(19) United States
(12) Patent Application Publication
(10) Pub. No.: US 2005/0221423 A1
(43) Pub. Date: Oct. 6, 2005

(54) Bacillus host cell

(76) Inventors: Jens Tonne Andersen, Naerum (DK); Steen Troels Jorgensen, Allerod (DK); Michael Dolbjerg Rasmussen, Vallensbaek (DK); Peter Bjarke Olsen, Kobenhavn O (DK); Ib Groth Clausen, Hillerod (DK)

Correspondence Address: NOVOZYMES NORTH AMERICA, INC., 500 FIFTH AVENUE, SUITE 1600, NEW YORK, NY, 10110, US

(21) Appl. No.: 10/510,408

(22) PCT Filed: Mar. 25, 2003
(86) PCT No.: PCT/DK03/00200

§ 371 Date: Oct. 5, 2004

(30) Foreign Application Priority Data
Apr. 10, 2002 (DK) PA 2002 00533

(51) Int. Cl. C12P 21/06; C12N 1/21; C12N 15/74; C07K 14/195

(52) U.S. Cl. 435/69.1; 435/471; 435/252.31; 530/350

(57) ABSTRACT

A Bacillus licheniformis mutant host cell derived from a parent B. licheniformis host cell, which mutant host cell is mutated in one or more gene(s) encoding one or more polypeptide(s) involved in sporulation which is at least 80% identical to one or more of the polypeptides shown in SEQ ID NO's: 2 to 191, wherein the mutant host cell expresses at least 5% less of the one or more polypeptide(s) involved in sporulation than the parent host cell, when they are cultivated under comparable conditions.

### TECHNICAL FIELD

[0001] Bacillus sp. are attractive hosts for the production of heterologous proteins due their ability to secrete proteins directly into the culture medium. They have a high capacity for protein secretion, are genetically highly amenable, nonpathogenic and free of endotoxins, and consequently a large variety of proteins from different organisms have been efficiently produced and secreted in Bacillus sp. i.e. in Bacillus licheniformis.

[0002] In the highly competitive biotech industry, even slightly improved Bacillus host cells are in demand, which may provide more attractive production systems, or may even just be alternative production systems.

### BACKGROUND

[0003] Many industrial products of commercial interest can be produced biologically in Bacillus sp. host cells e.g. heterologous polypeptides, amino acids, carbohydrates etc. Some of these products are sold as process aids, intermediates, or even end-products in the food and feed industries as well as in the pharmaceutical industry. There are increasingly strict regulations that must be complied with when producing such products in microbial production hosts for sale in these industries, for instance the presence of bacterial spores in the products is seen as a problem. When producing in Bacillus licheniformis it is thus desirable to ensure that the host cell is not capable of forming spores.

### SUMMARY

[0004] A problem to be solved by the present invention is how to obtain a Bacillus licheniformis host cell incapable of forming spores, or how to impair the sporulation process of said cell. The present invention provides a solution to the problem by providing a Bacillus licheniformis host cell which has a reduced capacity to produce one or more polypeptide(s) involved in sporulation.

[0005] Accordingly, in a first aspect the invention relates to a Bacillus licheniformis mutant host cell derived from a parent B. licheniformis host cell, which mutant host cell is mutated in one or more gene(s) encoding one or more polypeptide(s) involved in sporulation which is at least 80% identical to one or more of the polypeptides shown in SEQ ID-NO's: 2 to 129 (both included), or in SEQ ID NO's: 2 to 191 (both included), preferably at least 85% identical, more preferably at least 90% identical, still more preferably at least 95% identical, and most preferably at least 97% identical to one or more of the polypeptides shown in SEQ ID NO's: 2 to 129 (both included), or in SEQ ID NO's: 2 to 191 (both included), wherein the mutant host cell expresses at least 5% less of the one or more polypeptide(s) involved in sporulation than the parent host cell, where they are cultivated under comparable conditions. Preferably the mutant host cell expresses at least 10% less, more preferably at least 20% less, still more preferably at least 30% less, even more preferably at least 40% less, yet more preferably at least 50% less, or at least 60% less, or at least 70% less, or at least 80%, or most preferably at least 90% less of the one or more polypeptide(s) involved in sporulation than the parent host cell, when they are cultivated under comparable conditions. Most preferably the mutant host cell expresses absolutely nothing of the one or more polypeptide(s) involved in sporulation.

[0006] Comparable conditions of cultivation must be used in order to compare the expression level of the one or more polypeptide(s) involved in sporulation in a mutant host cell of the invention with that in a parent host cell. They are cultivated separately under identical conditions in identical setups, of course allowing for the usual standard deviations of the operating parameters normally associated with growth experiments, such as temperature control etc. The quantification of the expression level of the one or more polypeptide(s) is done by standard text-book assay techniques as known in the art e.g. mRNA quantification or immuno-based assays.

[0007] In a second aspect the invention relates to a process for producing at least one product of interest in a Bacillus licheniformis mutant host cell, comprising cultivating a B. licheniformis mutant host cell as defined in the previous aspect in a suitable medium, whereby the said product is produced.

[0008] Finally, an aspect of the invention relates to a use of a Bacillus licheniformis mutant host cell as defined in the first aspect for producing at least one product of interest comprising cultivating the mutant host cell in a suitable medium whereby the said product is produced.

Definitions

[0009] Nucleic acid construct: When used herein, the term “nucleic acid construct” means a nucleic acid molecule, either single- or double-stranded, which is isolated from a naturally occurring gene or which has been modified to contain segments of nucleic acids in a manner that would not otherwise exist in nature. The term nucleic acid construct is synonymous with the term “expression cassette” when the nucleic acid construct contains the control sequences required for expression of a coding sequence of the present invention.

[0010] Control sequence: The term “control sequences” is defined herein to include all components, which are necessary or advantageous for the expression of a polypeptide of the present invention. Each control sequence may be native or foreign to the nucleotide sequence encoding the polypeptide. Such control sequences include, but are not limited to, a leader, polyadenylation sequence, propeptide sequence, promoter, signal peptide sequence, and transcription terminator. At a minimum, the control sequences include a promoter, and transcriptional and translational stop signals. The control sequences may be provided with linkers for the purpose of introducing specific restriction sites facilitating ligation of the control sequences with the coding region of the nucleotide sequence encoding a polypeptide.

[0011] Operably linked: The term “operably linked” is defined herein as a configuration in which a control sequence is appropriately placed at a position relative to the coding sequence of the DNA sequence such that the control sequence directs the expression of a polypeptide.

[0012] Coding sequence: When used herein the term “coding sequence” is intended to cover a nucleotide sequence, which directly specifies the amino acid sequence of its protein product. The boundaries of the coding sequence are generally determined by an open reading frame, which usually begins with the ATG start codon. The coding sequence typically include DNA, cDNA, and recombinant nucleotide sequences.

[0013] Expression: In the present context, the term “expression” includes any step involved in the production of the polypeptide including, but not limited to, transcription, post-transcriptional modification, translation, post-translational modification, and secretion.

[0014] Expression vector: In the present context, the term “expression vector” covers a DNA molecule, linear or circular, that comprises a segment encoding a polypeptide of the invention, and which is operably linked to additional segments that provide for its transcription.

### DETAILED DISCLOSURE

[0015] A Bacillus licheniformis mutant host cell derived from a parent B. licheniformis host cell, which mutant host cell is mutated in one or more gene(s) encoding one or more polypeptide(s) involved in sporulation which is at least 80% identical to one or more of the polypeptides shown in SEQ ID NO's 2 to 191 (both included), wherein the mutant host-cell expresses at least 5% less of the one or more polypeptide(s) involved in sporulation than the parent host cell, when they are cultivated under comparable conditions.

[0016] The term “parent host cell” in the context of the present invention means a cell which is genetically identical, or isogenic, to the progeny mutant or mutant cell of the present invention, except for the mutated one or more gene(s) encoding one more polypeptide(s) involved in sporulation in said mutant.

[0017] The degree of identity, or %-identity of polypeptide sequences can suitably be investigated by aligning the sequences using a computer program known in the art, such as “GAP” provided in the GCG program package (Program Manual for the Wisconsin Package, Version 8, August 1994, Genetics Computer Group, 575 Science Drive, Madison, Wis., USA 53711)(Needleman, S. B. and Wunsch, C. D., (1970), Journal of Molecular Biology, 48, 443-453). Using GAP with the following settings for DNA sequence comparison: GAP creation penalty of 5.0 and GAP extension penalty of 0.3″.

[0018] An object of the present invention is to provide a culture medium free of bacterial spores so as to reduce the product purification to a minimum, and to comply with regulatory requirements. This may be done according to the invention by reducing or even completely abolishing the expression of one or more gene(s) encoding a native polypeptide(s) involved in sporulation via mutagenisation of that (those) gene(s). One of the very well-known method of ensuring that a gene is not expressed into an active polypeptide within a cell is simply to delete or partially delete the encoding gene. Many techniques have been described in the art on how to specifically delete or partially delete one or more gene(s) in the genome of a cell, and certainly from the genome of a Bacillus licheniformis cell (see e.g. Novozymes A/S WO 01/90393, Novozymes A/S WO 02/00907). Accordingly, a preferred embodiment of the present invention relates to a host cell of the first aspect, which is mutated by a partial or complete deletion of the one or more gene(s) encoding the one or more polypeptide(s) involved in sporulation.

[0019] A preferred embodiment of the present invention relates to a host cell of the first aspect, which is mutated in two or more genes encoding two or more polypeptides involved in sporulation.

[0020] The product of interest to be produced by the mutant host cell of the first aspect may be one or more polypeptide(s) encoded by one or more heterologous gene(s). Consequently, a preferred embodiment of the present invention relates to a host cell of the first aspect, which comprises one or more heterologous gene(s) encoding one or more heterologous polypeptide(s).

[0021] In the industrial production of polypeptides it is of interest to achieve a product yield as high as possible. One way to increase the yield is to increase the copy number of a gene encoding a polypeptide of interest. This can be done by placing the gene on a high copy number plasmid. However, plasmids are unstable and are often lost from the host cells if there is no selective pressure during the cultivation of the host cells. Another way to increase the copy number of the gene of interest is to integrate it into the host cell chromosome in multiple copies. Integration of two genes has been described in WO 91/09129 and WO 94/14968 (Novozymes A/S) the content of which is hereby incorporated by reference. A preferred embodiment of the present invention relates to a host cell of the first aspect, wherein the heterologous gene(s) is present in at least two copies, preferably at least 4 copies, and most preferably at least 6 copies. In another embodiment the heterologous gene(s) is present in at least ten copies. If carried on a plasmid the gene(s) may be present in several hundred copies per cell, so in a still further embodiment of the present invention the heterologous gene(s) is present in at least 100 copies.

[0022] Integration of two genes closely spaced in anti-parallel tandem to achieve better stability has been described in WO 99/41358 (Novozymes A/S) the content of which is hereby incorporated by reference, as well as the stable chromosomal multi-copy integration of genes described in WO 02/00907 (Novozymes A/S) the content of which is incorporated herein by reference. A preferred embodiment of the present invention relates to a host cell of the first aspect, wherein the heterologous gene(s) are stably integrated into the genome of the cell.

[0023] Selection of chromosomal integrant has for convenience resulted in the use of selectable markers such as antibiotic resistance markers. However it is desirable if possible to avoid the use of antibiotic marker genes. WO 01/90393 discloses a method for the integration of a gene in the chromosome of a host cell without leaving antibiotic resistance markers behind in the strain, the content of which is hereby incorporated by reference A preferred embodiment of the present invention relates to a host cell of the first aspect wherein the heterologous gene(s) is integrated into the genome of the cell without leaving any antibiotic resistance marker gene(s) at the site of integration.

[0024] The present invention also relates to nucleic acid constructs comprising a nucleotide sequence encoding a product of interest, which may be operably linked to one or more control sequences that direct the expression of the coding sequence in a suitable host cell under conditions compatible with the control sequences.

[0025] A nucleotide sequence encoding a polypeptide of interest may be manipulated in a variety of ways to provide for expression of the polypeptide. Manipulation of the nucleotide sequence prior to its insertion into a vector may be desirable or necessary depending on the expression vector. The techniques for modifying nucleotide sequences utilizing recombinant DNA methods are well known in the art.

[0026] Other ways of increasing the product yield would be to increase promoter activity of the specific promoter regulating the expression of a specific gene of interest. Also a more general increase in the activity of several promoters at the same time could lead to an improved product yield. The control sequence may be an appropriate promoter sequence, a nucleotide sequence which is recognized by a host cell for expression of the nucleotide sequence. The promoter sequence contains transcriptional control sequences, which mediate the expression of the polypeptide. The promoter may be any nucleotide sequence which shows transcriptional activity in the host cell of choice including mutant, truncated, and hybrid promoters, and may be obtained from genes encoding extracellular or intracellular polypeptides either homologous or heterologous to the host cell.

[0027] Examples of suitable promoters for directing the transcription of the nucleic acid constructs of the present invention, especially in a bacterial host cell, are the promoters obtained from the E. coli lac operon, Streptomyces coelicolor agarase gene (dagA), Bacillus subtilis levansucrase gene (sacB), Bacillus licheniformis alpha-amylase gene (amyL), Bacillus stearothermophilus maltogenic amylase gene (amyM), Bacillus amyloliquefaciens alpha-amylase gene (amyQ), Bacillus licheniformis penicillinase gene (penP), Bacillus subtilis xylA and xylB genes, and prokaryotic beta-lactamase gene (Villa-Kamaroff et al., 1978, Proceedings of the National Academy of Sciences USA 75: 3727-3731), as well as the tac promoter (DeBoer et al., 1983, Proceedings of the National Academy of Sciences USA 80: 21-25). Further promoters are described in “Useful proteins from recombinant bacteria” in Scientific American, 1980, 242: 74-94; and in Sambrook et al., 1989, supra.

[0028] Other useful promoters are described in WO 93/10249, WO 98/07846, and WO 99143835 (Novozymes A/S) the contents of which are incorporated fully herein by reference. A preferred embodiment of the present invention relates to a host cell of the first aspect, wherein the heterologous gene(s) are transcribed from a heterologous promoter or from an artificial promoter.

[0029] The control sequence may also be a suitable transcription terminator sequence, a sequence recognized by a host cell to terminate transcription. The terminator sequence is operably linked to the 3′ terminus of the nucleotide sequence encoding the polypeptide. Any terminator which is functional in the host cell of choice may be used in the present invention.

[0030] The control sequence may also be a suitable leader sequence, a nontranslated region of an mRNA which is important for translation by the host cell. The leader sequence is operably linked to the 5′ terminus of the nucleotide sequence encoding the polypeptide. Any leader sequence that is functional in the host cell of choice may be used in the present invention.

[0031] The control sequence may also be a polyadenylation sequence, a sequence operably linked to the 3′ terminus of the nucleotide sequence and which, when transcribed, is recognized by the host cell as a signal to add polyadenosine residues to transcribed mRNA. Any polyadenylation sequence which is functional in the host cell of choice may be used in the present invention.

[0032] The control sequence may also be a signal peptide coding region that codes for an amino acid sequence linked to the amino terminus of a polypeptide and directs the encoded polypeptide into the cell's secretory pathway. The 5′ end of the coding sequence of the nucleotide sequence may inherently contain a signal peptide coding region naturally linked in translation reading frame with the segment of the coding region which encodes the secreted polypeptide. Alternatively, the 5′ end of the coding sequence may contain a signal peptide coding region which is foreign to the coding sequence. The foreign signal peptide coding region may be required where the coding sequence does not naturally contain a signal peptide coding region. Alternatively, the foreign signal peptide coding region may simply replace the natural signal peptide coding region in order to enhance secretion of the polypeptide. However, any signal peptide coding region which directs the expressed polypeptide into the secretory pathway of a host cell of choice may be used in the present invention.

[0033] Effective signal peptide coding regions for bacterial host cells are the signal peptide coding regions obtained from the genes for Bacillus NCIB 11837 maltogenic amylase, Bacillus stearothermophilus alpha-amylase, Bacillus licheniformis subtilisin, Bacillus licheniformis beta-lactamase, Bacillus stearothermophilus neutral proteases (nprT, nprS, nprM), and Bacillus subtilis prsA. Further signal peptides are described by Simonen and Palva, 1993, Microbiological Reviews 57: 109-137.

[0034] The control sequence may also be a propeptide coding region that codes for an amino acid sequence positioned at the amino terminus of a polypeptide. The resultant polypeptide is known as a proenzyme or propolypeptide (or a zymogen in some cases). A propolypeptide is generally inactive and can be converted to a mature active polypeptide by catalytic or autocatalytic cleavage of the propeptide from the propolypeptide. The propeptide coding region may be obtained from the genes for Bacillus subtilis alkaline protease (aprE), Bacillus subtilis neutral protease (nprT), Saccharomyces cerevisiae alpha-factor, Rhizomucor miehei aspartic proteinase, and Myceliophthora thermophila laccase (WO 95/33836).

[0035] Where both signal peptide and propeptide regions are present at the amino terminus of a polypeptide, the propeptide region is positioned next to the amino terminus of a polypeptide and the signal peptide region is positioned next to the amino terminus of the propeptide region.

[0036] It may also be desirable to add regulatory sequences which allow the regulation of the expression of the polypeptide relative to the growth of the host cell. Examples of regulatory systems are those which cause the expression of the gene to be turned on or off in response to a chemical or physical stimulus, including the presence of a regulatory compound. Regulatory systems in prokaryotic systems include the lac, tac, and trp operator systems. In yeast, the ADH2 system or GAL1 system may be used. In eukaryotic systems, these include the dihydrofolate reductase gene which is amplified in the presence of methotrexate, and the metallothionein genes which are amplified with heavy metals. In these cases, the nucleotide sequence encoding the polypeptide would be operably linked with the regulatory sequence.

[0037] The present invention also relates to recombinant expression vectors comprising the nucleic acid construct of the invention. The various nucleotide and control sequences described above may be joined together to produce a recombinant expression vector which may include one or more convenient restriction sites to allow for insertion or substitution of the nucleotide sequence encoding the polypeptide at such sites. Alternatively, the nucleotide sequence of the present invention may be expressed by inserting the nucleotide sequence or a nucleic acid construct comprising the sequence into an appropriate vector for expression. In creating the expression vector, the coding sequence is located in the vector so that the coding sequence is operably linked with the appropriate control sequences for expression.

[0038] The recombinant expression vector may be any vector (e.g., a plasmid or virus) which can be conveniently subjected to recombinant DNA procedures and can bring about the expression of the nucleotide sequence. The choice of the vector will typically depend on the compatibility of the vector with the host cell into which the vector is to be introduced. The vectors may be linear or closed circular plasmids.

[0039] The vector may be an autonomously replicating vector, i.e., a vector which exists as an extrachromosomal entity, the replication of which is independent of chromosomal replication, e.g., a plasmid, an extrachromosomal element, a minichromosome, or an artificial chromosome.

[0040] The vector may contain any means for assuring self-replication. Alternatively, the vector may be one which, when introduced into the host cell, is integrated into the genome and replicated together with the chromosome(s) into which it has been integrated. Furthermore, a single vector or plasmid or two or more vectors or plasmids which together contain the total DNA to be introduced into the genome of the host cell, or a transposon may be used.

[0041] The vectors of the present invention preferably contain one or more selectable markers which permit easy selection of transformed cells. A selectable marker is a gene the product of which provides for biocide or viral resistance, resistance to heavy metals, prototrophy to auxotrophs, and the like.

[0042] Examples of bacterial selectable markers are the dal genes from Bacillus subtilis or Bacillus licheniformis, or markers which confer antibiotic resistance such as ampicillin, kanamycin, chloramphenicol or tetracycline resistance.

[0043] The vectors of the present invention preferably contain an element(s) that permits stable integration of the vector into the host cell's genome or autonomous replication of the vector in the cell independent of the genome.

[0044] For integration into the host cell genome, the vector may rely on the nucleotide sequence encoding the polypeptide or any other element of the vector for stable integration of the vector into the genome by homologous or nonhomologous recombination. Alternatively, the vector may contain additional nucleotide sequences for directing integration by homologous recombination into the genome of the host cell. The additional nucleotide sequences enable the vector to be integrated into the host cell genome at a precise location(s) in the chromosome(s). To increase the likelihood of integration at a precise location, the integrational elements should preferably contain a sufficient number of nucleotides, such as 100 to 1,500 base pairs, preferably 400 to 1,500 base pairs, and most preferably 800 to 1,500 base pairs, which are highly homologous with the corresponding target sequence to enhance the probability of homologous recombination. The integrational elements may be any sequence that is homologous with the target sequence in the genome of the host cell. Furthermore, the integrational elements may be non-encoding or encoding nucleotide sequences. On the other hand, the vector may be integrated into the genome of the host cell by non-homologous recombination.

[0045] For autonomous replication, the vector may further comprise an origin of replication enabling the vector to replicate autonomously in the host cell in question. Examples of bacterial origins of replication are the origins of replication of plasmids pBR322, pUC19, pACYC177, and pACYC184 permitting replication in E. coli, and pUB110, pE194, pTA 060, and pAMβ1 permitting replication in Bacillus. The origin of replication may be one having a mutation which makes its functioning temperature-sensitive in the host cell (see, e.g., Ehrlich, 1978, Proceedings of the National Academy of Sciences USA 75: 1433).

[0046] More than one copy of a nucleotide sequence of the present invention may be inserted into the host cell to increase production of the gene product. An increase in the copy number of the nucleotide sequence can be obtained by integrating at least one additional copy of the sequence into the host cell genome or by including an amplifiable selectable marker gene with the nucleotide sequence where cells containing amplified copies of the selectable marker gene, and thereby additional copies of the nucleotide sequence, can be selected for by cultivating the cells in the presence of the appropriate selectable agent.

[0047] The procedures used to ligate the elements described above to construct the recombinant expression vectors of the present invention are well known to one skilled in the art (see, e.g., Sambrook et al., 1989, supra).

[0048] The introduction of a vector into a bacterial host cell may, for instance, be effected by protoplast transformation (see, e.g., Chang and Cohen, 1979, Molecular General Genetics 168: 111-115), using competent cells (see, e.g., Young and Spizizin, 1961, Journal of Bacteriology 81: 823-829, or Dubnau and Davidoff-Abelson, 1971, Journal of Molecular Biology 56: 209-221), electroporation (see, e.g., Shigekawa and Dower, 1988, Biotechniques 6: 742-751), or conjugation (see, e.g., Koehler and Thorne, 1987, Journal of Bacteriology 169: 5771-5278).

[0049] A preferred embodiment of the present invention relates to a host cell of the first aspect, wherein the heterologous gene(s) are comprised in an operon, preferably a polycistronic operon. The term “operon” in the context of the present invention means a polynucleotide comprising several genes that are clustered and perhaps even transcribed together into a polycistronic mRNA, e.g. genes coding for the enzymes of a metabolic pathway. The transcription of an operon may be initiated at a promoter region and controlled by a neighboring regulatory gene, which encodes a regulatory protein, which in turn binds to the operator sequence in the operon to respectively inhibit or enhance the transcription. The gene or the operon can be carried on a suitable plasmid that can be stably maintained, e.g. capable of stable autonomous replication in the host cell (the choice of plasmid will typically depend on the compatibility of the plasmid with the host cell into which the plasmid is to be introduced) or it can be carried on the chromosome of the host. The said gene may be endogenous to the host cell in which case the product of interest is a protein naturally produced by the host cell and in most cases the gene will be in it normal position on the chromosome. If the gene encoding the product of interest is an exogenous gene, the gene could either be carried on a suitable plasmid or it could be integrated on the host chromosome. In one embodiment of the invention the eubacterium is a recombinant eubacterium. Also the product of interest may in another embodiment be a recombinant protein.

[0050] The product of interest is any gene product or product of a metabolic pathway which is industrially useful and which can be produced in a bacterial cell such as a B. licheniformis.

[0051] In one preferred embodiment, the heterologous polypeptide(s) is an antimicrobial peptide, or a fusion peptide comprising a peptide part which in its native form has antimicrobial activity.

[0052] In another preferred embodiment, the heterologous polypeptide(s) has biosynthetic activity and produces a compound or an intermediate of interest.

[0053] Yet another embodiment relates to a host cell of the first aspect, wherein the compound or intermediate of interest comprises vitamins, amino acids, antibiotics, carbohydrates, or surfactants, and preferably the carbohydrates comprise hyaluronic acid.

[0054] In one embodiment the heterologous polypeptide(s) is an enzyme, particularly the enzyme is an enzyme of a class selected from the group of enzyme classes consisting of oxidoreductases (EC 1), transferases (EC 2), hydrolases (EC 3), lyases (EC 4), isomerases (EC 5), and ligases (EC 6). Preferably the enzyme is an enzyme with an activity selected from the group consisting of aminopeptidase, amylase, amyloglucosidase, mannanase, carbohydrase, carboxypeptidase, catalase, cellulase, chitinase, cutinase, cyclodextrin glycosyltransferase, deoxyribonuclease, esterase, galactosidase, beta-galactosidase, glucoamylase, glucose oxidase, glucosidase, haloperoxidase, hemicellulase, invertase, isomerase, laccase, ligase, lipase, lyase, mannosidase, oxidase, pectinase, peroxidase, phytase, phenoloxidase, polyphenoloxidase, protease, ribonuclease, transferase, transglutaminase, or xylanase. Preferably the enzyme is an amylase or a mannanase.

[0055] A second aspect of the invention relates to a process for producing at least one product of interest in a Bacillus licheniformis mutant host cell, comprising cultivating a B. licheniformis mutant host cell as defined in the first aspect of the invention in a suitable medium, whereby the said product is produced. One embodiment relates to a process of the second aspect, further comprising isolating or purifying the product of interest. Suitable media for the cultivation is described below as well as methods for the purification or isolation of the produced product which is an optional additional step to the process of the present invention.

[0056] In the production methods of the present invention, the cells are cultivated in a nutrient medium suitable for production of the polypeptide using methods known in the art. For example, the cell may be cultivated by shake flask cultivation, small-scale or large-scale fermentation (including continuous, batch, fed-batch, or solid state fermentations) in. laboratory or industrial fermentors performed in a suitable medium and under conditions allowing the polypeptide to be expressed and/or isolated. The cultivation takes place in a suitable nutrient medium comprising carbon and nitrogen sources and inorganic salts, using procedures known in the art. Suitable media are available from commercial suppliers or may be prepared according to published compositions (e.g., in catalogues of the American Type Culture Collection). If the polypeptide is secreted into the nutrient medium, the polypeptide can be recovered directly from the medium. If the polypeptide is not secreted, it can be recovered from cell lysates.

[0057] The medium used to culture the cells may be any conventional medium suitable for growing the host cells, such as minimal or complex media containing appropriate supplements. Suitable media are available from commercial suppliers or may be prepared according to published recipes (e.g. in catalogues of the American Type Culture Collection). The media are prepared using procedures known in the art (see, e.g., references for bacteria and yeast; Bennett, J. W. and LaSure, L., editors, More Gene Manipulations in Fungi, Academic Press, CA, 1991).

[0058] The polypeptides may be detected using methods known in the art that are specific for the polypeptides. These detection methods may include use of specific antibodies, formation of an enzyme product, or disappearance of an enzyme substrate. For example, an enzyme assay may be used to determine the activity of the polypeptide as described herein.

[0059] The resulting polypeptide may be recovered by methods known in the art. For example, the polypeptide may be recovered from the nutrient medium by conventional procedures including, but not limited to, centrifugation, filtration, extraction, spray-drying evaporation, or precipitation.

[0060] The polypeptides of the present invention may be purified by a variety of procedures known in the art including, but not limited to, chromatography (e.g., ion exchange, affinity, hydrophobic, chromatofocusing, and size exclusion), electrophoretic procedures (e.g., preparative isoelectric focusing), differential solubility (e.g., ammonium sulfate precipitation), SDS-PAGE, or extraction (see, e.g., Protein Purification, J.-C. Janson and Lars Ryden, editors, VCH Publishers, New York, 1989).

[0061] A third aspect of the present invention relates to the use of a Bacillus licheniformis mutant host cell as defined in the first aspect for producing at least one product of interest comprising cultivating the mutant host cell in a suitable medium whereby the said product is produced, and optionally isolating or purifying the produced product.

The application's sequence listing, which the Patent Office published only in electronic form, follows.

SEQUENCE LISTING (191 sequences)

SEQ ID NO: 1 - DNA, 1055 bp, Bacillus licheniformis
  CDS (34)..(552)
ccttaaggtaaggcaaaaaagaaggtgatattgatgtacagccgaagcaagttcaaaatcggtttattgcttattggaagtctgctggccgcgctcagctttcacctggaggccttggccgaaaagccggctaaagttcaaatccagcttgaaaaggtttatctggacggagacgttggaattgagaataaagtagaggccgctcgcacactggaagactttaaagctgcttataaagggtggcagctcatcgatcagaaaaaggggtttattctgtttcgcaaacaggtggacgacatttctcccctcagcaaaacaaacggttatatcggagtgactgaagatggcgtgatttcgacttttcacggtcgcccgggcatcttatcagaacccattcaatcgttttttcagattgatataaagcggctggaaagccggatggcggatgatctgcgcaaagggataccataccgcacgaaaaaggaatttgaacatgtcattgaagccgtaaaatcatccggaagccaacatcatgtagaagatatgaagacatgacgctgttatgtcttttttcagctgcagacagaagcttttttagcgaacatatgttaactttttcattctagctttgcctgttttgtgttacaatgaagagcagtcaaagaggtgaatgaacgttgatcgaattcgtaaaagggacgattgattatgtatcgccccaatatattgtcattgaaaacggcgggatcggctatcagatcttcacgccaaatccgtttatttataagaaaaacagcaaagaaacaatctatacataccattatgtaagagaagacacgaatgcgctgtacggcttttcgacaagggaagaaaaaatgctgtttacgaaaatgctgaatgttacggggatcggcccaaaaggagcgcttgcgatcctcgcttccggcgatccgggagcggtgattgaagcgatcgagaatgaggacgaagcatttctcgtcaaatttcccggcgtaggcaaaaaaacggcaaggcagatcatccttgacctgaaa

SEQ ID NO: 2 - protein, 173 aa, Bacillus licheniformis
MYSRSKFKIGLLLIGSLLAALSFHLEALAEKPAKVQIQLEKVYLDGDVGIENKVEAARTLEDFKAAYKGWQLIDQKKGFILFRKQVDDISPLSKTNGYIGVTEDGVISTFHGRPGILSEPIQSFFQIDIKRLESRMADDLRKGIPYRTKKEFEHVIEAVKSSGSQHHVEDMKT

SEQ ID NO: 3 - DNA, 2130 bp, Bacillus licheniformis
  CDS (501)..(2039)
agaagatgaagtacggcaaaaggagcgtctttattttttttaagagaaaagatgtaaaagtcatattcccatcatggtaaacgaggccggacagaaagaaaaacagcggcatatgaaatgcgaaaatgaacgttttcagccaatccggcgtcggtgtatggcccaatacgaccaatataattcccacgcctttcgaaacatcaatccactctattcttttctgcaacacgggtatctcctttcagaccgcttcgccccataagaaagggtttacacataatgtaccatcatccccgcctttcttcctccgcgaatcacgcctcaaggcgatttttaatcgtcaggaaatattttgttcatcttcttgtaatgatcgattctattttttaacatactcagcacatactgcgtttcttattctcatcatgaggaaccagaccatgcaacccgtcttataatgtaatgatcttttcatcagaacaaaagaggacaggtgaaacatgaaacttgaaaaattcgttgaccggctccccattccgcaagtgcttcaaccccaaagcaaaagcaaggaaatgacctattatgaagtcaccatgaaagaatttcagcagcagcttcaccgcgatctgccgccgactcggctgtttggatataacggagtttatcccggccctaccttcgaagtgcagaaacacgaaaaagtcgcagtcaagtggttaaataagcttccggatcgccattttctccccgtcgaccatacgcttcacgatgacggccatcacgaacatgaagtgaagacggtcgttcatttgcacggaggctgtacgcctgctgacagcgacggatatcctgaggcttggtacacaaaagacttccatgcaaaaggccctttctttgaaagggaggtgtatgaatatccgaatgagcaggatgctacagctctttggtatcatgaccatgcaatggccatcacaaggctgaatgtatatgcggggcttgtcggtttatattttattcgcgacagggaagagcgttcattgaacttgccgaagggagaatatgaaatcccgcttttgattcaggataaatcatttcatgaagatggttcattgttttatccgcggcagcctgacaacccttcgccggatcttccggacccgtcgattgttccggctttttgcggtgataccattttagtcaacggcaaggtatggcctttcgctgaactggaaccccgaaaataccgttttcggatactgaacgcctccaatacgagaatctttgagctgtatttcgatcatgacatcacatgtcatcaaatcggcacggacggcggtcttctgcagcatccggtcaaagtcaatgaactggtgatcgcgccggctgaaaggtgcgatatcatcgttgatttttcacgagcagaaggaaaaaccgtgacactgaaaaaacggatcggctgcggcggacaagacgcagatcccgatactgatgccgacatcatgcaattccgcatctcaaaacctttgaagcaaaaagatacaagttcattgccgagaatattgagaaagcgcccattttaccggagacacaagatcaatgccctcagaaatctgtcattgggcgcggccgttgaccaatatggaagacctgttctgcttttaaacaacacaaagtggcatgaaccggtaaccgaaacacccgcactcggcagcactgagatctggtcgatcatcaatgccggaagggcgatccatccgatccatttacatcttgttcaatttatgattctcgaccaccggccgtttgatatcgagcggtatcaggaaaacggagaacttgtttttaccggtccggcagttcctccggcaccgaatgaaaaggggctgaaagacaccgtcaaagtacccccgggttcagtgacgcgcattatcgccacctttgcgccgtacagcggcagatatgtttggcactgccacatccttgagcacgaagattacgatatgatgcgccctcttgaagtgacagatgttcgtcatcaataagaaaaagcctccgcatttggaggcttttaaaaaagcacaaatcatcaaaaaaaccatcgctgaatcctgtacaatattgcacccaggc

SEQ ID NO: 4 - protein, 513 aa, Bacillus licheniformis
MKLEKFVDRLPIPQVLQPQSKSKEMTYYEVTMKEFQQQLHRDLPPTRLFGYNGVYPGPTFEVQKHEKVAVKWLNKLPDRHFLPVDHTLHDDGHHEHEVKTVVHLHGGCTPADSDGYPEAWYTKDFHAKGPFFEREVYEYPNEQDATALWYHDHAMAITRLNVYAGLVGLYFIRDREERSLNLPKGEYEIPLLIQDKSFHEDGSLFYPRQPDNPSPDLPDPSIVPAFCGDTILVNGKVWPFAELEPRKYRFRILNASNTRIFELYFDHDITCHQIGTDGGLLQHPVKVNELVIAPAERCDIIVDFSRAEGKTVTLKKRIGCGGQDADPDTDADIMQFRISKPLKQKDTSSLPRILRKRPFYRRHKINALRNLSLGAAVDQYGRPVLLLNNTKWHEPVTETPALGSTEIWSIINAGRAIHPIHLHLVQFMILDHRPFDIERYQENGELVFTGPAVPPAPNEKGLKDTVKVPPGSVTRIIATFAPYSGRYVWHCHILEHEDYDMMRPLEVTDVRHQ

SEQ ID NO: 5 - DNA, 1223 bp, Bacillus licheniformis
  CDS (501)..(722)
atcgggagattatatgaagtatgttttttggacatgctgccttacaatgcttggcttcctcccgaagtatgtgtaaggcgcaaatttgaataagcgtttagcgtaaggaggaattgtacaactaagataagaggacagtccaagactggactatcgagtattatggtattaagcgagtagacaagtttattttttaaaatttattgcataaaataaaatacatcgagaattaccccttttttcaagaggtatcctgaaggatgcttcttgtttttttgaatgaattcgaatagacaagctgcaaatatggatcgaaatcataataacttctctcctttcagtttaagtatccttaaaaaatttttgaggatgctttttttgatttaggctgtggatagtactcgatcggacaaatatgggtgattgtaatggtacatgtatacactgtttatcatagtttaataatgaatatgatcaatgaatgaaaggagagcttagtcatgtttcattgcaaaccaaatgtgatgccgccaattgtacacccgactaattgttgtcaaactcatactttttctaaaacaattgtgccgcatattcatccgcagcatataacaaatgtgcatcataagcatttccagcatgtgcatcaatatccacacacttattctagttacgatcctgttacacactctcatactcattgtggtaaaccatgttgtaactagtgggattaaacaatgactgtatggtttacagtgcatcatcatatatagcacccaactgggtgcttttttatgttctctgtaaaccgggtccagtaaatctcagaataaacgattggcggccaatgagagcctctgagtgtgggcccggtttagaaagaatataccaggcgctttcccaaacgagagggcgttttttatttgagggagatgatccaaatggaatcgaaatgcaagcattgcggtgaggttcatggagttttattgcgagaggagaaaagggagaatggcgttgaaattgggtatattcaatgccccgcctgccagcatagggccgtgttttctgtgactaccccacaaattagagtcctccaaaagcgtattagaggtgtaaagaaccaatatgcgaaagccaagaggctaaagaaagccgagcgccttttgacagagtatttcaatttaaaggagcgtattggcctacttatgcagcctttagtcgag

SEQ ID NO: 6 - protein, 74 aa, Bacillus licheniformis
MFHCKPNVMPPIVHPTNCCQTHTFSKTIVPHIHPQHITNVHHKHFQHVHQYPHTYSSYDPVTHSHTHCGKPCCN

SEQ ID NO: 7 - DNA, 1549 bp, Bacillus licheniformis
  CDS (501)..(1046)
tttaaacattacgaaaagcacgaagcgcttaaacaaacggaagcaaagattgacgcgcttcaggaagagcttgacgagattccgatcattcaagagttcagagactcccaaatggaagtcaacgaccttcttcagcttgtcgcgcatacaatatcaaaccaagtgacaaacgagatcatcacatcgaccgggggagacctgctgaaaggcgagaccggttcaaaagtgaaaaattcatcaccgagctgttctctataatttggcggcgccttttaaggcgccgttttttttgaattcaatttcccgccgcgacggcttattgaaaagattcgtttttcggctgtctttttcttttctgatttaagtcaagtttatccttttacctgcatacacttaaacagattcattatatgggaatttattttgatttctcaaggaacgcacattagacgaatgcccagcataggataatacgaggaaaaacaaggaggcatgaccgaatgtctgaatacagggaaattatcactaaagcggtggtcgcgaaaggccggaaattcacccagtccactcatacaatctccccttcgcaaaagccaaccagtattttaggcggttggattatcaatcataagtatgacgctgaaaaaatcggaaaaaccgtggaaattgaagggacatatgatatcaacgtctggtattcatatgcggacaacaccaaaaccgaagttgtgacagaacgcgtttcctatgttgatgtcattaagctccggtatcgcgacaaaaattacttagatgatgaacacgaagtcattgcgaaagtgcttcagcagccgaactgccttgaagtgaccatttctccgaacggaaacaaagtggttgtacaggcggaaagagaatttttagcagaggtcgtcggcgagacgaaggtcgtcgttgaggtcaattctgattggacggaaagcgatgaagaagaagcgtgggaagaagagcttgatgaagaacttgaggatatcaatcccgagtttttggttggagatccagaagaataaaaggaagctagggaaacaccgccctagtttcttttttttcagcacgaatctttatggtataatgagtgttggaatcaatagaaacgtttatacatagtgagggattaaatatggcaggctacacgcctatgatacagcaatatttaaagattaaggcagagtatcaggatgcctttttattttttcgtcttggcgacttttatgagatgttttttgaagatgcaaaaaaggcgtctcaggagctcgaaatcacgctgacgagcagggacggaggatcaagcgaaagaattccgatgtgcggggttccttatcattcctgctcttcgtatatcgaacagctcattaaaaaaggctataaagtcgcgatctgtgaacaggtggaggaccctaaatcggccaaaggagtcgtcaaaagggaagtcgtgcagctgatcacacccggcaccgtgatggacggcaaagggattcatgaaaatgaaaacaactttatcgcctctgtc

SEQ ID NO: 8 - protein, 182 aa, Bacillus licheniformis
MSEYREIITKAVVAKGRKFTQSTHTISPSQKPTSILGGWIINHKYDAEKIGKTVEIEGTYDINVWYSYADNTKTEVVTERVSYVDVIKLRYRDKNYLDDEHEVIAKVLQQPNCLEVTISPNGNKVVVQAEREFLAEVVGETKVVVEVNSDWTESDEEEAWEEELDEELEDINPEFLVGDPEE

SEQ ID NO: 9 - DNA, 1477 bp, Bacillus licheniformis
  CDS (501)..(974)
gtatgttgaaatgtcatgaatcaaaaagagcagcatagacgactgctcttttctaacgtcgcaatttcattttcaaataaagacgatgagatgagcaggtctcggccttctctcattgtttctttattctaacataaggtcaaatcgcaagtaaaacgatcataaggcttgaaagcgagcgaatgttccatgtgaaacagtgtcagtcgagaaaccccgatttttctttatttttctttctcgcctttctgatcagcaacaatataatcaaaactgcgaccagaagcgtcacgcgaagccctccgctcaaaaatagaaaaaagtccttcaacatatccaacacattgatcacctctcactgttgtcacttagatgcaaaaatcccgtattatttgacttcccctttccaaaacggtctaaaacgtccctcagattcttcttaacctttagacggtaatgggcatatgctgactaagaaaaagcaataaaggagaatatgaatgacaacaaaaacattggcttggcatgaaacgttggagttgcatgaactaatcgcggcacagtctgtcggattggtgaagatcaagaaaagcatgaagaaaatcagcgaccctcagttaagacagctttacagcgtgtcagcaaaagcattggagcaaaatttaagagagcttcttccctttttgccaaaagctccagcatttcagcgggaggatgaacgggctgacttgtattttgatgcgggtgatctgttggtgctggcgaaaacgaccgttcgaaactatgcgattgcgatcacggaaacggcgacgcccgagctcaggagagtgcttgttaaacaaatcaatgcggccattaagttgcatgaacaagttttttattttatgtaccaaagaggcttatatcccgcctataacctcgtcgacctgctaaaaggcgacgccatgcatgcgcaaaaagcgatatcgatgagataaaaaagccagcgaggatagaatcctcactggctctgttttttgctattttacgattaaaaccggacacttcactcttttcgccactttatggctgacacttccgagcaccatttcctgcaaagtgttcagccccctgcttccgataatcacgatatcaacatcatgatggttggcgtacgatacaatggccgggcccggatccccgtgctgcatcgtcatttgatagggaacggccgcctgttttaatttattttctatcgacagcagcctgctgcgccgttcgcgttcgagttctgtacggttttcgctatgcaggacttcatgttttgctctcgcataatccaatacataaatcatgtcgacgaccgcttcgtttgacatggaagccagatgaatcgcatgatcggcagctctttcagaatgcttggaaccgtcagcagccagcagtatatgtctatacacccttcatcacccgtttcttagtgatttgacactgaacg

SEQ ID NO: 10 - protein, 158 aa, Bacillus licheniformis
MTTKTLAWHETLELHELIAAQSVGLVKIKKSMKKISDPQLRQLYSVSAKALEQNLRELLPFLPKAPAFQREDERADLYFDAGDLLVLAKTTVRNYAIAITETATPELRRVLVKQINAAIKLHEQVFYFMYQRGLYPAYNLVDLLKGDAMHAQKAISMR

SEQ ID NO: 11 - DNA, 1752 bp, Bacillus licheniformis
  CDS (183)..(1256)
ctgacatggacccactcatcttgtaacctcctgttcttccttttttatgtcctgatttatacatacgcgccgtaaagacaagtgtactgaggcaaatgactgtttttgttcaaacttaggcggtctgcttccgggacaggtttttttcacatatgatatgtcagctgaaaaaggaggaaatgatgatgagtgccactgccttgccggcctttaggctgcacattcatccgaagcatctgcttgagttgaaaaaagacgtctggagtgatgaagccgttcccggcatgctcttgaccggttcagcaaagacgcctgtcgcagtgtcatacagaggggcccacacccgcaaactgacgaaaaaatcctatttcattcaatatccggacaataaagaaaaggctgcgtttcatttgaacgcggaatatcatgatccgtctttcatcagaaacaggctttcctttcatttttttgaacaaatcggcgtccttgcgccagcagcatcacacgttttcctttatatcaatgaaaaaaaagaaggcatctatttaaaaatcgaatctgttgacgatcatttcttaaagaggagaaatttagaaaggggggccatttattatgccgttgatgacgatgctaatttttctctgctgagttccttcaataaaaaggctaagcaaaatctcatgcagggatacgaaagaaaaacgggttcaagccgccacgatgactacctccatgagtttatctactttatcaataccgccaaagacgacatatttgaaaaagaaatcaaacgctatctcgatgtcaaacaatatttgctgtggctcatcggcgccgtctgcacccaaaatttcgacggctttgtccataattacgcgctttatttaaacggtcgcacaaaaacgtttcaaatcattccatgggattatgacgcgacatggggacggaatattcacggggaagaaatggagcacaaccggattccggcgaaaggctataatacgctgtctgcaaggctgctcgacatcccggcttttcaatcccaatactttaatttaatgaaaaatgtcttgcaccgccaatttacaatcagccggctttcgcggtatgcggtaaactggcacgagacaatcgcgccttttcttgaacatgatccttatacaaccgtcacatacagccggctcgaagatgagcaaaaacaaatttttcatttcatcgatcagaggaagcggttcctgcttttcgagctttcccgataatagactgtcgctgtcctccgaaaaaaatgtcacattttttgtcatattggcgaaaaaaatcccttttacacaaaataaggtatactagcaatatcaaggacatcaatgcgctgaatacctgaaattaccgactcaaaatacaaatcgaaagttggagactgccatgatgaacaataaaattgaagcaaaaagactggccttatttgaagctgccgaaaagttcggcatcaactccaaagaggccattcgatgcagtcaggaattggacaacttgctgaatcaaagaatgcaaaaggatgataactgcgtgcatgcggaagaaagaaaaggccgccacacgtcatgacctccgactgcaagctgcgcctgatgccggcctccttcctcctccatttcatcatccgttgatttcgggtcgcagcttgggctattcggccattgttttttgaacataaatcatcgtgcaaataccgtaggcaagaatggctgaagg

SEQ ID NO: 12 - protein, 358 aa, Bacillus licheniformis
MMSATALPAFRLHIHPKHLLELKKDVWSDEAVPGMLLTGSAKTPVAVSYRGAHTRKLTKKSYFIQYPDNKEKAAFHLNAEYHDPSFIRNRLSFHFFEQIGVLAPAASHVFLYINEKKEGIYLKIESVDDHFLKRRNLERGAIYYAVDDDANFSLLSSFNKKAKQNLMQGYERKTGSSRHDDYLHEFIYFINTAKDDIFEKEIKRYLDVKQYLLWLIGAVCTQNFDGFVHNYALYLNGRTKTFQIIPWDYDATWGRNIHGEEMEHNRIPAKGYNTLSARLLDIPAFQSQYFNLMKNVLHRQFTISRLSRYAVNWHETIAPFLEHDPYTTVTYSRLEDEQKQIFHFIDQRKRFLLFELSR

SEQ ID NO: 13 - DNA, 1570 bp, Bacillus licheniformis
  CDS (501)..(1067)
accaaagtcaaatcgtatcgcccgtttcacagcgcctttgatccgtgtccgccgatcggcaaaagatactacagaacccctccaaatctatatctaggttttcagccccgcggccttccgcagttttccccgatggaggcgctgcaaaaagggacgctttggcccgtattttacgatcattatgaaaatccgtatgaagatgggaggtaaggagggtgacgaactctttaccgcaagactattataaaaggcttcatgaaattcaggctgttgattttgtcatcgttgagctgatgctataccttgacacacatcccgatgataccgatgccatcaaacaatacaaccagtatgccggattttccagaaaactgaaagcgaagtttgaatcaaaatacggccctttgattcaaggaagcccggatcagacggaatcctattggagctggaaaagaagtccttggccatggcaagtttaatagaggaagggagtcaggttcatgtggctttatgagaaaaaactgcagtatcctgttagggtgagagaatgcaatccgagacttgccaaatttttgattgagcaatacggcggagcggacggcgaattggctgcggcgcttcgctatttgaaccagcgctacagcatacccgataaagtcgtcggactgctgacggacatcggtacggaagagtttgctcaccttgaaatgattgccacgatggtatataaattaacaaaagacgcgacgcccgagcagatgaaggaagccgggctcggcgatcattacgcagaccatgacaaagccctgttttatcataacgctgccggcgttccgttcaccgctacatacatccaggcaaaaggcgatccgattgccgatttatatgaagatatagcggctgaagaaaaagcgagggctacgtatcaatggctgattgacatgtcggatgatccggatttaaatgacgggctggcgtttttacgggaaagggaaatcgttcattcacagcgcttccgcgaagctgtcgaaattttgaaggaagagcgcgaccgtaaaaaagtgttttaaacagcaaaaagccgaaaatacgaccgtattttcggctttttatttactgcaccgggctcgcaagcagttctgctgcgcggtcgcgcagcacatatttttgaacttttccggatgcggtcagcgggtattcgtcgatcagaaatacgtactccggaattttataatacgaaagctgtcctttgcaaaaatctctgacgtcttcgagcgtcagctttttgcccggcctgcatttaataaaggcagccgttttttccccgtacttttcatccggaacgccgacaacctgtacatcgacaatatcctcatgttcataaaggaattcctctatttcacgcgggtaaatgttttccccgccgcggacgatcatatcttttaagcgcccggtaatcctcacgtatccgtcccggtccatttctgccaaatctccggtatggagccagccgtcttcatcgatggccttttttgtggcttcatccattttatagtagcctttcatgacg

SEQ ID NO: 14 - protein, 189 aa, Bacillus licheniformis
MWLYEKKLQYPVRVRECNPRLAKFLIEQYGGADGELAAALRYLNQRYSIPDKVVGLLTDIGTEEFAHLEMIATMVYKLTKDATPEQMKEAGLGDHYADHDKALFYHNAAGVPFTATYIQAKGDPIADLYEDIAAEEKARATYQWLIDMSDDPDLNDGLAFLREREIVHSQRFREAVEILKEERDRKKVF

SEQ ID NO: 15 - DNA, 1241 bp, Bacillus licheniformis
  CDS (519)..(1028)
agccttcctttctttctaatatttttaaagaaattgaggtgagaaacaattggcagattttgaaaaacttcaagagaacgtagatccgataatgaaatcagttgttaaaaatatcttgaaaaatcggggagtaaccagcgataaagttcggacgctctcagaagaagaaaaagaaaatattttcaatatgctggaagatctaaaaaaacaaaccgatgctttggttcaaaaacagaaagaaaaagcagccgcaccgaatgaaaaagggacaaagagagaaaagaacgctgatgcgtcatcagaaaatggcgagagaccaagaagaagaagaaacagaacaaatagactgagagaaaaacttcgacaacggagggagcaagaaaacacagcaacagcggaaaattcaaccgagtcagatacttcagcagaaaaaaatggggatttgtagtagggtatctgtcttatacaagttaaggagttacaacatttaataatagtaaatggaaggaggaaaagaaatggaaacaagaccatattcatggattgcgcttgacccggaatgcgaacatccaggcaacgattatcaccctagttatcctaagaaaaaattatgtgacgactatacttgcaactgtggtaggaaagggcaaaatggctttatcgattctgacctagatcaacttcatcttaacaaacagctctcagatgaaacgatcatcattaaagactcttgtgatgttcaagtctcaactgaagacacacaaacgttggcatcagtcatgacagctgcacaaacactagctgttactattattctcgccattatcgatgatcctgatctagccgaacttgtcacaactgatctgttgcaggtaactgccaataaacaaacgaacagacaaaaattggtgatcgataattccagaaatgtacatgtcacaaccgaagatacagacacagctatcatcgtaagcacatttgttcaaactgttgtaatcaccatcaccgcccttatcgtcggccttctataattcaaaaagcagagccaaccagctctgcttttcttcatttttatagacgattacccacaccaacaagggcacgggtacatatgttgttaaagactaaagtcaaatatccctataaaaaggagctgaaatccatgagctgcggaaaacaccatggccggcatgaaaattgtgtatgcgatgcagtagaacagattataaaagaacaggatg

SEQ ID NO: 16 - protein, 170 aa, Bacillus licheniformis
METRPYSWIALDPECEHPGNDYHPSYPKKKLCDDYTCNCGRKGQNGFIDSDLDQLHLNKQLSDETIIIKDSCDVQVSTEDTQTLASVMTAAQTLAVTIILAIIDDPDLAELVTTDLLQVTANKQTNRQKLVIDNSRNVHVTTEDTDTAIIVSTFVQTVVITITALIVGLL

SEQ ID NO: 17 - DNA, 1516 bp, Bacillus licheniformis
  CDS (501)..(1013)
acgtcggtcacgccggggaccctaatatggcacacggcaaagaagatgactgcgggtgcgggccgggccaattcccgggaggttttccaggtgcggcgccatatggacagatgccgcaaatgggagctccgtacggtatggggggatacggacagcagcctgcagggggacagatgtttaacagaccggaagatgatgaagactgattcggaatgggacgatgatctatcgttccttttttattgtggaccgctataaacattttcatgctatttaacgggaatgtctataactgtcaagggtaactcttcgcatcccgcacatcctaaaaaagagcgcaatgctcaaattcagcggttttcacggggggtactaccattggacagcaagctgaaagtgttttcggggattttgcttttgacagcaggtctatctgcatgcggaacgaacgacgctatagataatggaaacaatacgcgcccgatcggatattatctcaaatgatgcagatcgtaatgcagggtcttgataatgacggccctgttacagaaatgcttgaaaacatgaacgggagacacggtgcaacaaacgtaaacaatcgagcgggaaacggcaatcccgttccaacaggcgatggaacttacagccggggagacatgaattatcacaaccatttggtgaatacggcggatacaggctatgacagaccggaaaaccgtaaaatctcaaggaatatcactgggcgcgtcaacaaattgaattatgttgacgaaagccaggcagtcgtaacgaatgaaacggtcatcatcgccgtacggtctgataaaaggctgacaaataacgagagaactcaaattagaaaagcagccaaaacatttgccggagaccggaccgttcaagttgtcgaggacgacggcgcatttacaaggctgcgcgaaatgaacgatgatcctcagaacattagggatcgcggagacacgacgaataacaatttgaaccgcttgcggaaccaataacaagcagggaattgccggggattccccggcaattttttataagcgctcggccgattcctttacaaaaacggggaaaaccgtataaagtgtacatagagacgagaattattttggaggtagaaagttatggctggccattctaaatggaaaaatattcagagacgaaaaaatgcccaagatgctaaacgcggcaaaattttcatgaagcttgccaaagaaatatatgtagccgcgaaagaagggggaccagatcccgaatctaacgcaagtctgcgtctcgtcatcgataaagccaaaaatgcaaacatgccaaatgacaacatcgaccgcgccatcaaaaaagcttccggcagccaggatggaaaaagctatgaggaaattacgtatgagggctacggaccaagcggtgtggctgtcatggtcaaatgtttgacagataataaaaaccggacggcgacaagcgtcagaaccgctttcagcaaaaacggcggcagcttggg

SEQ ID NO: 18 - protein, 171 aa, Bacillus licheniformis
MMQIVMQGLDNDGPVTEMLENMNGRHGATNVNNRAGNGNPVPTGDGTYSRGDMNYHNHLVNTADTGYDRPENRKISRNITGRVNKLNYVDESQAVVTNETVIIAVRSDKRLTNNERTQIRKAAKTFAGDRTVQVVEDDGAFTRLREMNDDPQNIRDRGDTTNNNLNRLRNQ

SEQ ID NO: 19 - DNA, 1249 bp, Bacillus licheniformis
  CDS (501)..(746)
catccttttacaagtgccgctcacccgtttatttgagaggtataaatccttaacaacaatatcaattggaaccgttttttgcattttggggaatatcggtttttctatcgcaaatggctggattgtttttatgctttcgatgtttgttctgacaatcggcgaaattttatgttttccttcaatgaatgtccttttggacgagctggctccggatcatatgaagggcgcgtattacggcatgcaaaacttatacaacatcggtgagtttttagggccttggctggggggaatgatgcttgccttgtacgggggaaaagccgtctttcttattgctgcgtgttcagtctttttggctttaggcgcttaccatgtgggaaggagaaagtttttatctgcacagcattatggtgtatcgcctttttcttattgaaaatttaggccgcttatgcatgaatcattaagaattacccaacctaaaaggtaaaaaaggagtatgaatcatggacacaacattgggctacctccgtgagtcactgtcgaatcaccttgaacacggcataggacaaaacatttacagaaaaatcgtttccgggcgatatgccaatgaggaagagtttgtcgagcacttggaggagcgggaaatggaatttctgaatcaagtgcttgaacatgagatgaaatatgcgctgaatgaacaggaccataaacggacaagagaattaaacgaagtgtatgaactgctgttttgaaaggcgggaatgatcaatgggtgcaatagagcggaacggatacacgtttgaaccggaatacagcgtgaccagacaaaacggtgcgatccatgtataccggcgcggccggtttgtcgaggagattccctttgagtttcacggggagtttccagagcatgatttaattgaagagcttgtcaatcattattgttatgaaaataaaatataaggcttgaagaggctgccgaccgggcggcttttatttttggatttttatatctataatccgcttgcagttttttagaacggcagcagaaaagctgccataaatatgacagctcatgcatcgctattttttcttttcgtcgtagtattgaacagggtacatggatccttccgataccattttgttatcttcgatatcatgcggagacgggtgtcctgctttttcaaccgggaatgaatctacgttgtgtttttccgaaaagtaagggatcttttctttgacgttttgcaagtac

SEQ ID NO: 20 - protein, 82 aa, Bacillus licheniformis
MDTTLGYLRESLSNHLEHGIGQNIYRKIVSGRYANEEEFVEHLEEREMEFLNQVLEHEMKYALNEQDHKRTRELNEVYELLF

SEQ ID NO: 21 - DNA, 1620 bp, Bacillus licheniformis
  CDS (501)..(1121)
cttcgtgaaaaatacagttctaaagatcaaaaaacgcagcagaagcttcaacaggaaacgatggctctcatgcagaagcacggggttaacccgcttgccggatgtttcccgatcttaattcaaatgccgattttaatcggattctatcatgccattatgagaacgcgggaaatcgcagaacacagctttttatggtttgaccttggggagcgtgatccgtatttcattttgccgattctcgccggtgtgttcacattcattcagcaaaagctgatgatggcgggaacagcgcagcaaaatccgcagatggcgatgatgctttggctgatgccgatcatgatcgttgtatttgcgatcagtttcccggcggctctttccctgtactgggtagtcggtaacttattcatgattgctcaaaccttctttatcaaagggcctgatctaaaggctgagagacaggaagcggcagccggaggaaaaaaatccggaggtaagaaaaagtgaaggaactgactgctactggacgtaccgtcgatgaagcagtgcaatccgggcttgaacagctgggccttcatgcagatgatgtcgaagtcgacgtagttgatgaaggaaaaaagggattattcggcattttcggtcatcggtctgcagtcgtgaacattcgggaaaaaatagacccggttaaagaagcaaaacaatatttggaaaatgtaatttcgaatatgggaatacaagcccaggtgacggcagaagaggagtctaaacgagtggtttttcagttgaaaggagacaaaacagctcttttaattggaaaaaggggacaaactttaaatgcccttgaaacgctgacgcagctcgtgctcaatcgtcattccgacagatatatccaagcggtggttgacgccgaaggataccgcgcaaagcggaaggaaacacttgctcagctggcattgaagcttgctgaccaggcggccaggcagaaaaaagacattcacctggagccgatgccttccagtgagcgcaaggtcatccatgatacgcttgcgggctactcgcagcatatcgaaacttactctaccggtgaagaccataaccggcaccttgtcatctcatataaaaaataacatgaaaaccgaagttcccaaaattggggcttcggtttttttgccgttgaaaatcgatgaaatgcagcaaaatcagtttaagttctattttttcaggcgtaagctgttgatgaaaatgaaatttaattgttattcacatgtggataagttaaagtaagtaatgatggcttagaacggttgtggataacggttcaagtcacttccacttcaattgaaactatgttatctttaaattttgattacaataaaagtttttcatccgtatacgatgtttggaagatgacccggcaaatggggataatagatataggaatgaaaaagagaggtgaaagccatggataccatcgctgcgatttcaacgccgatgggagaaggggcgattgcgatcgtccggatgagcggccctgaggctcttgcgatcgccgataaagtgtataaaggacctcgcggaaaaaggctgagttccgtcgattcacatacgattaactacggtcat

SEQ ID NO: 22 - protein, 207 aa, Bacillus licheniformis
VKELTATGRTVDEAVQSGLEQLGLHADDVEVDVVDEGKKGLFGIFGHRSAVVNIREKIDPVKEAKQYLENVISNMGIQAQVTAEEESKRVVFQLKGDKTALLIGKRGQTLNALETLTQLVLNRHSDRYIQAVVDAEGYRAKRKETLAQLALKLADQAARQKKDIHLEPMPSSERKVIHDTLAGYSQHIETYSTGEDHNRHLVISYKK

SEQ ID NO: 23 - DNA, 1614 bp, Bacillus licheniformis
  CDS (501)..(1115)
gtgtttatcgccgaaccttccccaaaaaggagaaactaaaaaggccatcaaaaatgtgacgccgaaaacgtatccgctccattttgccgtaaatccgtccgaatagctgccaagcgtctcaatatagagggaaagaaacggcagaaccattgtggagcttgcggccacgaaaaaattcgcaaaccacatgatcacaaggtttttcttataaacagagatgcgaatcaccttcttaaaaaatttgaattccctttcattataaatgaaatgcgaaagctgcatggaattgatgctctatagaatgacgaaaaatgggcatttgaaggaattttcaacattttcagaaaataaaaccttaaatatagaaatataatgatataataagagaaatatgagcgtactttggaaaacattcagaagactataggcttggataatttcaatccgctgcgttaccaccataagttttttatattgagatagaaaggcaggtgtgaaagttggaagcgagcaccttactgattattgattttgaatttacaatgcctgagggaaagtatcacccgcaaaattttttcccggaaatcatagaagcagggattgtaaagacggttcatgatgaggtggttgagacgttttcaagctatattaagccgaagaagttccctaaattaacgaggcgctgcaaaaattttctcagcatcacgcaggaacaggttgaccaaggcatcacgtttaacgcgctgattgaaaagctgcgggagcttgatcctgaccgaaacagcgtcatcattacatggggaaacatggatatgaaagtgctgaagcaaaattgcatgttcaaccatgttccgtttccgtttaaaggagagatgagggacctttccatggagtacaaggaatttttcggcgacaaaacattgacgaatttgtggaaggcagcggaagagtacggcgattcaggaacgggaaaacagcataaagcgcttgacgacgcgatgacaacgtataagttgtttcggctcgtagaacgggataagaagtatttggaaaatccgaagccgacgacgatcggcgaacgggttgacctctcaaaagtctttccgcacgccacataaaaaacccaatctgacaaacagattgggttatttgtgcaggaaatattctttttcaagcccatgaataagctcaagcgattttgccgcgtattcggacgaatcgttttgcagatccgtttttaagcggctcaaagctgagcggagcgaatccgcataatccggtacagcttcatcgaacggcttcaccatgcggtgcgggatattcgtctgttcaccgtaagcgagcgcttttcgttcatgaaaaaaagggacgtctgcccgattgggatgatgaaggtcgccctgcttcggatgggtcagcacggcgaggattttgaccaggtagtgcatcggtttaacatccgtaatttcgccgatgtagacgcctgttttataaaagccctttacgcgatctccgacttgaaattggttgttcactgcatctgcctcctaatggtatcataataaataaatggtaaaaaaatcatttcagggaggaagaaaaatggcgccgttt

SEQ ID NO: 24 - protein, 205 aa, Bacillus licheniformis
LEASTLLIIDFEFTMPEGKYHPQNFFPEIIEAGIVKTVHDEVVETFSSYIKPKKFPKLTRRCKNFLSITQEQVDQGITFNALIEKLRELDPDRNSVIITWGNMDMKVLKQNCMFNHVPFPFKGEMRDLSMEYKEFFGDKTLTNLWKAAEEYGDSGTGKQHKALDDAMTTYKLFRLVERDKKYLENPKPTTIGERVDLSKVFPHAT

SEQ ID NO: 25 - DNA, 1600 bp, Bacillus licheniformis
  CDS (501)..(1097)
acctgcatcagcattttttggtactcaggatctttcatcagttttttcagcactttttcatgttcattttgaagtgttttggcaaagccttcagcgaattttggatcttcaaagacttttttccaaaattcagctccttttttggaggtcattgttttttcaacggtttctttgacagttttttcatccattacaagtgtttcatttaatttgtcatcatttaatatttcttgaatcgctttttttccgtcatctgtctttaatatatcgacaaccatttttttggtttgatcatagtccatctcagctgcttggtccgtgggagcacaagctgttacagatagaaacagaaaacagcttatcgatagcattgcggtcttgaacatgcttaagctcctttcgaaaactcgtcttacctttaatatgaatgtcttttaaaaatttatacataacaaaatatcgctgttacagcggtttatttaggggttgggaagtctacaatgaaaagccgtaatctcgtccgatttttcttttccgtattgggtgtcggagctttgactacaagtattgtcggttttgccatagagtggggaagatataaggagctgtttctttccttcgaggtattggagattctgtctgttcttttctggtttatcggggttggcatgatctttagcgtgattgctcaaatgggatttgtgattttcttaacgattcaccgctttgcactggaaattttcagatctcattctttgtggaattcgattcagctgtttttgattatatttgtcgcgtttgacttggtttacttgcgctttctgttttttgaaaaagatggaggctccatcattccgtacatttggctgccgctctttattttggcggtaggcattgcggccgcttatgcaaagcaaaaacagtcctctaaaaaaacgttcgtttccgcattatttctaatgtttgtttttactgtgatggagtggttcccggcgttaagggtcaatgaagaggactggctctatttaatgctgcttcctttattagcctgcaacgcttttcagcttttaatgctgccaaaatttcaggcacgcgcttagaccggctgctactttacttctgaagattttgcatccgtatttgcgattaattcgctgactgttacgtttttgagccccttgcttctgagatggtgcacgatctctggcagggcttcttttgtttgtttggcggaatctgaagcgtgaaagagcacgatgtcaccggcgtttaccgttccatttacgttttggacgatcttttgaacccccgggttcgtccagtcatccgagttaatactataatgaacaacggtgtagccgtactgtttagcaacatcgagtacgtctttattaaactggccggtcggcggtcttaaaagcgtaaggtcgtcaagcccgagtttttgaaaggagtgtcgtgcttttgctaagtcttttttgatctcgcttttcttcatttgcgaatagtttttataagcatagcccatactcccgatctggtgaccatctttacggattctttctacgacatccgggtggcgctctgcccatgaagctga

SEQ ID NO: 26 - protein, 199 aa, Bacillus licheniformis
MKSRNLVRFFFSVLGVGALTTSIVGFAIEWGRYKELFLSFEVLEILSVLFWFIGVGMIFSVIAQMGFVIFLTIHRFALEIFRSHSLWNSIQLFLIIFVAFDLVYLRFLFFEKDGGSIIPYIWLPLFILAVGIAAAYAKQKQSSKKTFVSALFLMFVFTVMEWFPALRVNEEDWLYLMLLPLLACNAFQLLMLPKFQARA

SEQ ID NO: 27 - DNA, 1991 bp, Bacillus licheniformis
  CDS (489)..(1499)
gaaaaggtaaaagccctcctcgaccatcatctccaagagctcacaatggaagaagagacagatcagcgcacggtggaaattccggtttgttacggcggccgtttcggccctgatttggaggaagtggccgacatcaacggcctgactgcacaggaagtcatcgatattcacacctcgggtgagtacctcgtttatatgatcggctttgcgccgggcttcccttacctaggcggaatgtctgaaaagatagccgcaccgcggcggtcatctcctcggacttcgattcccgccggttcagtcggaatagccggcatgcaaacaggcgtctatcccctttcaacgccgggcggctggcagctgatcggcaatacgccgcttgaattattcaagccttatgaacagcctccgagccttctgagagcaggggatatcgtgaaatttgtcagcgtgacagaagaggagtatcacgcgctgaaggaggggaaatcttgagcatagaagtgttaaagccgggtctgatgacaacggttcaagacttgggccgcacaggttttcaaaaatacggcgtgcttgtcagcggtgccatggatgccgattctttgcggattgccaatctgctcgcggggaacagccagaacgaagctgcgcttgaagtgacgctgatggggccggggccgtctctccgctttcaaaaacctgctcttatagcggtgacgggcgctgacttttcactgatggtaaatgacgaagaagtcccgctttggcgcccggttttcatcaaagagggcagcgtgttgacattcggcatgtgcaagcgcggaagccgtgcatatatggcagtggccgggggaattgatgtgccgcctgtaatggaaagcaaaagcacatatgtcagagcaggactcggcggctttcaaggaagggcgcttcaaaagggagacgtgttatcgctaggcagcccgacgccgttgtcggaagcgctgcacagaaagctcgcagacgagggcaaagaacggggctttgcggctccgaagtgggctgtcgaccgcaaatattttctcccgctaaaaaagaacccggtcattcgtgtcatcaaaggcgatcagtttgcttgctttacctcatcatcacaagagcgctttttcgcgggtccattccgggtgacggctaaatccgaccggatggggtaccgtcttcaaggagaggcgctcgaactcactcagcctctggaaatgatctctgaagcggtatcattcggaacgattcaagtgccgcccgacggcaatccgatcgttcttctcgcagacaggcagacagcgggcggatacccgagaatcgcccatatcgcatcagctgatttttctcaggtcacgcagatgatgccgggcgagcaggtgcagtttcagcttgtcagccttcaggaagcagagcgcgtttacatcgaacgggagacgaaaatcagcgaactttctgcccgattgaagcttgaatacatgttatgataggtgtgatgtgtatcaggagggggaaggcatggaacataaaaacaaaacagtcgtcaaagccatgaccctgctcaatctgttcctgacgagagaaaggctctcgctgggcgacatgattgagctgacaggcatgccgaaaacatctgtctaccgcatggtttgttctctcgaagaaatgggttttctcgaccgcgacgagaacgggatgtatagcttaggactgctgtttttgcaatacggccaccttgtttcagaaaggcttgatattcgaaaaatcgctctgcccatcatggaagaactccgcgatgacgtggatgaagccgtccatttaattgtaaggcagggaaatgaagcaatgtatatagaaaaaattgagggcacgcagaccgttcgcctctatacagcgatcgggaggcggtcccctttatatgccggagcctgtgcgagaagcattctgacgtttttgcctgaagaggagcgggatgc

SEQ ID NO: 28 - protein, 337 aa, Bacillus licheniformis
LSIEVLKPGLMTTVQDLGRTGFQKYGVLVSGAMDADSLRIANLLAGNSQNEAALEVTLMGPGPSLRFQKPALIAVTGADFSLMVNDEEVPLWRPVFIKEGSVLTFGMCKRGSRAYMAVAGGIDVPPVMESKSTYVRAGLGGFQGRALQKGDVLSLGSPTPLSEALHRKLADEGKERGFAAPKWAVDRKYFLPLKKNPVIRVIKGDQFACFTSSSQERFFAGPFRVTAKSDRMGYRLQGEALELTQPLEMISEAVSFGTIQVPPDGNPIVLLADRQTAGGYPRIAHIASADFSQVTQMMPGEQVQFQLVSLQEAERVYIERETKISELSARLKLEYML

SEQ ID NO: 29 - DNA, 2287 bp, Bacillus licheniformis
  CDS (501)..(1784)
ttgattaaaggaaacttaacattaaaaaagtatgaccgcgtatttgaaattatcgatgaagtggtcatcgaagctcagcatgaatcaaagctttcaaaccttagaatcccgcgcgcggcgtatgagctgcttacatttaactggatggcccattcgctgacgcttgaatatgaggtgatcggtcaagtcaaggatttgtcagcttatgaagaaaggctcgtcgttctcatcagaaagctgtttgggatttttgacgatgccgttttgaaaggcagcgacaatcatctgacgatcacgctgcagacggacggtccggacgaccgcctcgtcatctttctcgatttccacggcgtattcacaaagctgaccggtatcaaagactttcatcattcactggccgacttttatgaaatcaagcggtttgatgtaacagaccgtgagtgcatcgccgaaattcatatcaagtaaagcggttttttaggaatagaacggaggacattatgtttgttgatcaggtgaaaatatacgtaaaaggcggagacggaggcaacggtatggttgctttccgccgcgaaaaatatgtgccaaaaggaggccctgccggaggtgacggcggaaaaggcggagacgtcgttttcaaagttgacgaaggtctcagcacgctgatggattttagatatcaaagacattttaaggcagcgcgcggagaacacggcatgtctaaaaaccagcacggccgaaatgccgaagacatggttgtgaaagtcccgcccggcacggttgtcattgacgatgatacaaaacaggtcatcgctgatttaacggagcacggacaggaagccgtcatcgcaaaagggggacgcggcggacggggcaatacacgttttgcgacgcctgccaacccggcgccgcagctttctgaaaacggcgaacccggcaaggagcgctatattgttctcgagctgaaagttttggcagatgtcggtcttgtcggcttcccaagcgtcggaaaatcaacgctcctgtctgtcgtgtcttcggccaagccgaaaattgccgattaccactttacaacgctgaacccgaatctcggaatggtcgaaacggaagacggccgcagctttgtaatggcggatcttccgggactgattgagggggcgcacgaaggagttggcctcggacaccaattcctcaggcatatcgaaagaacgcgcgtcatcgtgcacgttattgacatgtcgggtcttgaagggcgcgacccgtatgaagattatgtgaccattaataaagagcttgaacagtataatctcaggctgacagaacgtcctcaaattattgtcgccaataaaatggatatgccggatgcggaagaaaatctgaaggctttcaaagaaaagctcacagatgattatcctgtttttccaatcagcgcggtgaccagacaaggcttgagggatctgctgtttgaaattgccgaccgtttggaaacgacgccggaattcccgctctacgacgaagaagacatggctgaaaacagagtcatgtataagcttgaggatgaggaagcgccgtttgagatcagccgtgatcctgacggcaccttcgtgctcagcggagccaagcttgaacgcttatttaaaatgacggacttttcaagagatgagtctgttaagcgttttgccagacagcttcgcggaatgggcgtcgatgatgcgcttcgggcccgcggtgcaaaagacggggatacgatccgtcttctcgaatttgaatttgaatttatcgactgatcataccggagagtttgccaagcaagctctccgacttttagctgaaaggaacgcccttcctttcgcaggatcaatgtaaaggaatcagggtttttaaaaggagagaaaagtctgtgaaagaggagaccttttatcttgtcagggaagacgtgctgccggaggcaatgcggaaaacacttgaggtcaaaaagctgattgagcggaaaaaagcggaatctgtagctgaagccgtacaaaaggtagatttgagccgaagcgctttttataagtacagagatgcggtttttcctttttatacgatggtcaaggaacagattatcacgcttttttttcatttggaggaccgctcaggaacgctgtcccatctgctgcaagtggtagctgaatcgggctgcaatgtgctgtcgatccaccagaccatccctcttcaaggaagagcgaatgtcacgctctctgtcagtacgagaggcatggatgaaaatatcgatttgctgatgaac

SEQ ID NO: 30 - protein, 428 aa, Bacillus licheniformis
MFVDQVKIYVKGGDGGNGMVAFRREKYVPKGGPAGGDGGKGGDVVFKVDEGLSTLMDFRYQRHFKAARGEHGMSKNQHGRNAEDMVVKVPPGTVVIDDDTKQVIADLTEHGQEAVIAKGGRGGRGNTRFATPANPAPQLSENGEPGKERYIVLELKVLADVGLVGFPSVGKSTLLSVVSSAKPKIADYHFTTLNPNLGMVETEDGRSFVMADLPGLIEGAHEGVGLGHQFLRHIERTRVIVHVIDMSGLEGRDPYEDYVTINKELEQYNLRLTERPQIIVANKMDMPDAEENLKAFKEKLTDDYPVFPISAVTRQGLRDLLFEIADRLETTPEFPLYDEEDMAENRVMYKLEDEEAPFEISRDPDGTFVLSGAKLERLFKMTDFSRDESVKRFARQLRGMGVDDALRARGAKDGDTIRLLEFEFEFID

SEQ ID NO: 31 - DNA, 2115 bp, Bacillus licheniformis
  CDS (501)..(1616)
attcctcgtaaaaggcgcggatcgcgtcgccgccttttccctttaaagcatcatcaagtgatgtgatgccctcaacagcctttttgactttggcgatttcgtctgattgttgttttaattgttccagcgtttgatctattgcattgtgcagcgcctgaacatcaagagtcttcatggcattctcctctaatccttttcattacaatcagtatatagtttaccactttatagaaagtacttggtgaatatatcctgttcaaccatgaaaatgaatcattgggcttaggtcattatttctattgattcatttcgattaccgtaaacaagtttgttgtagcattctttaggctctgtgactaaaccaaaaagccatttgttttaaattggtctttcggtatcacgaaaatttcgttttttgggctgatagaagttttgcaattatgaattgtatgttaatctttaacataaaaaggatgttagctggaagggaatgatggcagttggagactatcccgtcttcagaagttggaatcaaaataaaccgctggtacaacgaaattcaaaaattaaacgtaatagaagcagaacgattaaaggcggaagttcacttagctatagaaagaatggaagaagatcaggacttgctttcctattatcagcttatgaattttagacatgagttaatgttggaatatcttttcccggcagaaaaaaagctgagcaaatctgattatcttagggaaattgagggacagggaagaaaattgtcaggcttgctcgaatactatttttcctttttcaccggaatgtatcatttttctcgcggaaaatacataaaggcaatcaaggcatatagagcagcagaaaaaaagttgacgaaagtttcagataaaatagaaaaggctgaattctattataagatggcggaagtgttttatcatatgaaacagactcatatgtcaatgtattatgtgtctctcgcttatgatatttataaatcctatgatgcatatgtgattcgaagaattaattgtctattcgttgttgctgggaattacattgatttatcaacccatgatcaagctttaccgcatcttttaagcgctaaggaatccgcggaagacattcaaaacaaggcgatcgttgcaaaggctcttttaaatgtagcatattgttataatgcaatggagagaccaacaaaagctattgaatactttcataaggcgattgatgtagcaaaggaaataaaggcaaaagaactgactcaggcttattatgatttggcattaattcactttcgaaataacgaaaatattgaaggacgaaaattttatgaaaaggcgcttgaaagtgcgcgggtatttgaagatgaattattcctgtgtctgttggatgttttagaggcactgtttataaaatcagctaataagtcagaggtactagaaacaatgaaaccattacgggatagtcgtggttacccctatcttgaggaactggcattagaagcagctctattctatactaggaatgagcggccaaatgattccatatttttttatgatcagatggtgcaggctcagaaacaaatcaaaaggggcgactttctgtatgaaatctaagctgtttctttcgctgacccttgctttgggcttgttggtcgtgtcgagcgcttccattcacacatctgttgaacaacaacatgcagaattttctgtagcatctaggctcgcaacataattgtgtttgggcaggtcatgtgatggcctgcctttttggtgaaagaattattttagtttgaaaaccagaacgattgtgttaatactcatctttcttcgtcccttgtgttggaattttcatcatatcaatatttgaatatgcggctgtccgcattattaacaattttaaattttttgcacaaattttatacaaaggcagacaaaaaccttgatatatcaatggttctatgggtatattcaaccacgaccaccgatatcgctaaaaaccgtattgccaaacgacgaaagagcgttccttacacaaggaatgctctttttgtttattcctcatcaaagcggagagccgccaacataaacgcaatgaccaactgttgtccgc

SEQ ID NO: 32 - protein, 372 aa, Bacillus licheniformis
LETIPSSEVGIKINRWYNEIQKLNVIEAERLKAEVHLAIERMEEDQDLLSYYQLMNFRHELMLEYLFPAEKKLSKSDYLREIEGQGRKLSGLLEYYFSFFTGMYHFSRGKYIKAIKAYRAAEKKLTKVSDKIEKAEFYYKMAEVFYHMKQTHMSMYYVSLAYDIYKSYDAYVIRRINCLFVVAGNYIDLSTHDQALPHLLSAKESAEDIQNKAIVAKALLNVAYCYNAMERPTKAIEYFHKAIDVAKEIKAKELTQAYYDLALIHFRNNENIEGRKFYEKALESARVFEDELFLCLLDVLEALFIKSANKSEVLETMKPLRDSRGYPYLEELALEAALFYTRNERPNDSIFFYDQMVQAQKQIKRGDFLYEI

SEQ ID NO: 33 - DNA, 2077 bp, Bacillus licheniformis
  CDS (501)..(1574)
ttgattaaagtggaaatattttaaaaaacatgtatggtaattaaaaatcttttcgtcaataaatattatggtctttttcctactttaacaaggcataatctttccctctattgaatgtaatatagtaaagcgaatagaggagggtatacaaatgaatccttactatatgatgctcttatgttatgtcctatcgatcatccactttttaataggctaccgggaagccctgaaaataagcggggttgacgggctggtcaacggaaccgcaatgatctcctgtattccgcttggcgcggttttcgcttttttcgcgcactttttttggaaaatgacgatttaatttcgggaatgaattttttcgccaacaaacatgcatttccgtgttattcacagacggcggcagtttatgctatgattaatagaacttcaatttacaaaaaattcacaaagattggagggaaaagaatggccaaagccgggcttctcaagaagtcgccaatatgctgaacgactggtacatactgatgaaaaaacgagacatttcaggttcaatcgaaatgaaagatgacatagataaagcaattgaaaagatggaagaagatcatgacgttcttctctattatcaaatgctggattttcgcttaaggcttcttcttgaagatatctcccaatcttccacagaaaaattggaagccatcagttttaaggacaaagatccaaaaagtacggacgataagctgaattattatttttatctgttcaaagggatttatgaagactacaagcaaaaccatacagaagcgcttaattttttcagaatagcggaaaaaaggctgagcgtcattcaaaatgaaattgaaaaagccgaatttcattataaaatcggtgttttgtattacaacttaaaagcgacatggctgtcgattcaccacatcaacattgcctcaggcatcttccaagggtatgacgggtatgccaagcgggtcatcaactgcaaaatgctgatcgggctcaattatattgaccaatttaagtttgccgaaagtgaagtattgttaaaggaagcaattgaaaaaaccgaaaaaatcggcgaccaatatcttttgccttatacctactataatatgggctttttgaagagtaaggaagataaacacgaagaagcgctgaagtattataataaagcttttgcaatcaaagactttgaaacgaaagccaagtatgcttaccttctatgtgtatatgaaaacacaaggtctcttttcaaaaccaacgatcccgaccaagcttttaaatggatcgacacaggctttaaaaaagctcaagaagtgaatagcgaaattttcgaattaaaattcaaaactttatatacattacattccgattgtcagaataaactggaagtaatcaaggactttattcaccaattagaagataaaaaagcatgggttgatctggaggaattgctgatggacgtagcgaattactatagggaaaataagttatacgaagaagccatatatttctacattaaaacagacaaggcaagtaaacttgccggaagaggaggagaataggatgaaaaaagtgttgttagctgtatttgtattaggcactgttttcagcttttcgtttgcaaatcacgctcctgaagcggcttcccaaagcaatgagatacttttggcttctcgtggagcaggcgggtgactacatcctcaaaatacccattcagacatctgctgaatgggtattttgcactttacattcatattcaggagtgatcgatatgggaaagaaagtactgctgacaggatttgacccctttgggggagaaacagtcaatccgtcctgggaagctgtaaaacggctgaacggagaggaagcagaaggcgtctctatcgcagcggagcagattccgaccgtttttcatcattcagcggccgttttgaaaaaagcgatcgaaaagcacaaacccgatgtcgtcatttgcgcagggcaagcaggcggcagggctcatattacgccggaacgcatcgcaatcaacatcgatgatgctcgcattccggataatgaagac

SEQ ID NO: 34 - protein, 358 aa, Bacillus licheniformis
MLNDWYILMKKRDISGSIEMKDDIDKAIEKMEEDHDVLLYYQMLDFRLRLLLEDISQSSTEKLEAISFKDKDPKSTDDKLNYYFYLFKGIYEDYKQNHTEALNFFRIAEKRLSVIQNEIEKAEFHYKIGVLYYNLKATWLSIHHINIASGIFQGYDGYAKRVINCKMLIGLNYIDQFKFAESEVLLKEAIEKTEKIGDQYLLPYTYYNMGFLKSKEDKHEEALKYYNKAFAIKDFETKAKYAYLLCVYENTRSLFKTNDPDQAFKWIDTGFKKAQEVNSEIFELKFKTLYTLHSDCQNKLEVIKDFIHQLEDKKAWVDLEELLMDVANYYRENKLYEEAIYFYIKTDKASKLAGRGGE

SEQ ID NO: 35 - DNA, 2101 bp, Bacillus licheniformis
  CDS (501)..(1598)
aaaacagcatgggctaaaatgacgctggacaaagcagtgtccttaggcttggaggcaaatgcatatttgaaaagaaacacagacggaaaagaactgagctgcagcccggctggaggaaaaggaaaagtgctcccggggcagacatcctgttatacaccgatggttgatttcgatccgcgttcttcatatgcgatgtagaaacattatcaatccattaacaggagctctcacttattcctatacaagttcgtattcatatttgaagaagtagtgtataaaagcaccctttcagcaagggtgctttttgctgtcttatcagtcacggtttcacagctattgaagagtcatttgacctaataaaagagtgggaaaagtgggggattcaggaaactgtgtaaaatgaactattactattaatttatacagggaggaaaatatagtatgatatgaataatgaataaaatacaaaaaaattgaatatcggaagaaaggagctccatatgaacaagatcgccgcggaagaagtcgccaacatccttaatacatggtaccgcgccatcagaagaaatgatgctgaacagtcgatccgaatatttgaagaagtcaaaccgatgctggcagagatggaggaagaccaagaggttttaatctactattctctgctggaactgcggcataaaatcatgctgtatgatacgcggggaaaaaagatagaacagcaagaggagttaacgaacggcggcagtgctgcatcacatatgacatcctattactactacctgttttcaggagcttatgaagtgtataaaaagaattatgagcaggcgatcagcttctataaaattgccgagaagaagcttgctcatgtacatgatgaaattgaggtggcgcaatttcacgataaagtcggaaagctctactattacttgggccagaatatcgtctctttaaaccatacccggcaggcgatggaaattttcaaggggcatggcgaccatgatatgaaccttgtttccacttatattacgatggccggaaattatacagagatggggaaatatacagaggcggaagaatatttaacagaagccatccatacggtaagaaaagccggcgactgttttaaagaaatgcagctccttcataattttgccttgctttatgcggcgatggacaattcggaaaaaagcattcagtttttagaaatcgttttggatgatcaagcatatgctgcatcagattattatttcaatgctgtgtttttaatgatcaaagagctgtttaaagtcggagaccataaacgcgctgcagccttttacaaagaagggaaggaaaggtcgaaatccgcggcgaataaaatatttgacgccaaaatcgatattttatatgcggcttatgcaggagatggtgaacaggcggttaaagactgcaaagacaacattgaaatcctgtttcaaacaaagcaatacgacagcgccagagaactttcgctcttaacggccaatgtttacagatcaaagtcactttataaagaagccgcacatttctttttggaagcgattaaagcggaagaaaaaatgaaaaaagtggagggaatgtgatgaaaaaactgttcattgttgctgcgattgctgccgtcgtatgttcgggatggtttgcggcagaaactcactgggcatccggcgacatgcaggttgctgaaaagatggtcggttaaatcgaatactcggaacaaatatgaacatccgctcctgagcatcagggcggatttttttgggaaggtaaagtaaattaaggcataagaaacgcggttagacaatgaacacttcttcaccactatttagggtggtcaacctaaacaaaggtacgaaacctgtgctgactacttttactccgatgtcctttcagctattcttgtcagtaagatcattccccatctcttcaacgcctcaggcatcacctattaaaaaaatcataattgaaacttgtcagcaaatatgttgcataacacgaggatgtttccacaataattaaacattaagacttttttgacttccagaaggaagaacaagatatttatgtaaaatcactcttttattca

SEQ ID NO: 36 - protein, 366 aa, Bacillus licheniformis
MNKIAAEEVANILNTWYRAIRRNDAEQSIRIFEEVKPMLAEMEEDQEVLIYYSLLELRHKIMLYDTRGKKIEQQEELTNGGSAASHMTSYYYYLFSGAYEVYKKNYEQAISFYKIAEKKLAHVHDEIEVAQFHDKVGKLYYYLGQNIVSLNHTRQAMEIFKGHGDHDMNLVSTYITMAGNYTEMGKYTEAEEYLTEAIHTVRKAGDCFKEMQLLHNFALLYAAMDNSEKSIQFLEIVLDDQAYAASDYYFNAVFLMIKELFKVGDHKRAAAFYKEGKERSKSAANKIFDAKIDILYAAYAGDGEQAVKDCKDNIEILFQTKQYDSARELSLLTANVYRSKSLYKEAAHFFLEAIKAEEKMKKVEGM

SEQ ID NO: 37 - DNA, 1936 bp, Bacillus licheniformis
  CDS (384)..(1433)
taatgaagcaaaaccggggagcaaatgggcgattggaacagagatgaaccttgtttcacgcatcattcaagaacatcctgataaacaaatcgaatcccttaaccctgatatgtgtccttgtttgacaatgaacagaatcgacatgccgcatttgctgtggtcgctggagcagatcgacaaaggtgaaccgacaggcgtgatcaaagtggatcaagatattgcaaaagatgccattcttgcgctgaatcggatgttaacgatccgttaactttttggagaacaagtttttatcataacccctccgctatgcgcataaatttgtggagaagcatatttgttattctcatctgttcgttcacgtttttgcataggaggggaaaacgttgaaaattcatattgtccaaaagggcgattctctggaaaaaatcgcggaaagatatgaagtggactttgaagaactgaaaaagctgaattcgcagctgagcaatccagacttgatcatgccgggcatgaaaatcaaagtaccgtcagggggagtgccggtcaaaaaagaagaacagctcaatatgcgaaaggaattaccgaaaaaacagcaggaacatccatttgcaaaagaaaagccgaaaagcaagcttgatgttgaagatataaaaccgaaagaaaagccttcggttccttatgttccgcctgtcccgaacatcggacaatcaagtttgcctgaaggcgacatttcgaatttgtatcaaagcgtcaatcagcttcatcagccgtacgtacctccaaaaccttatgaacatcaagagaaaggccccaacatgtataatccatggacaaatgaggaggaaaaccatatggaaaatgtcaattatccgaatgttccgcagccgccaaatgtcggtgcagcaggtgatgaaaataagcagtttcacggcatgccgaatgtagctgcagcgggatatcatcaccatccatatccttatccgttctatcctggaggctgctggattcctgtttcaccggtgctgcctggatcgggattgtgccatccttggtatccatatcctgctcaaatgccttatatgcatcagcctagctatgtatctcctgctgaatatgacgatgatgacaacatggggcatgacaatgccggtcatcacggataccatcatcagccgatgactgccccggcatatgcgccttaccagccgttcccgggatttgcaccgccaaacgtcggtcacgccggggaccctaatatggcacacggcaaagaagatgactgcgggtgcgggccgggccaattcccgggaggttttccaggtgcggcgccatatggacagatgccgcaaatgggagctccgtacggtatggggggatacggacagcagcctgcagggggacagatgtttaacagaccggaagatgatgaagactgattcggaatgggacgatgatctatcgttccttttttattgtggaccgctataaacattttcatgctatttaacgggaatgtctataactgtcaagggtaactcttcgcatcccgcacatcctaaaaaagagcgcaatgctcaaattcagcggttttcacggggggtactaccattggacagcaagctgaaagtgttttcggggattttgcttttgacagcaggtctatctgcatgcggaacgaacgacgctatagataatggaaacaatacgcgcccgatcggatattatctcaaatgatgcagatcgtaatgcagggtcttgataatgacggccctgttacagaaatgcttgaaaacatgaacgggagacacggtgcaacaaacgtaaacaatcgagcgggaaacggcaatcccgttccaacaggcgatggaacttacagccggggagacatgaattatcacaaccatttggtgaatacggcggatacaggctatgacag

SEQ ID NO: 38 - protein, 350 aa, Bacillus licheniformis
LKIHIVQKGDSLEKIAERYEVDFEELKKLNSQLSNPDLIMPGMKIKVPSGGVPVKKEEQLNMRKELPKKQQEHPFAKEKPKSKLDVEDIKPKEKPSVPYVPPVPNIGQSSLPEGDISNLYQSVNQLHQPYVPPKPYEHQEKGPNMYNPWTNEEENHMENVNYPNVPQPPNVGAAGDENKQFHGMPNVAAAGYHHHPYPYPFYPGGCWIPVSPVLPGSGLCHPWYPYPAQMPYMHQPSYVSPAEYDDDDNMGHDNAGHHGYHHQPMTAPAYAPYQPFPGFAPPNVGHAGDPNMAHGKEDDCGCGPGQFPGGFPGAAPYGQMPQMGAPYGMGGYGQQPAGGQMFNRPEDDED

SEQ ID NO: 39 - DNA, 2027 bp, Bacillus licheniformis
  CDS (501)..(1526)
aagagcaaattctgtctatgagcacaacagaagaggttgtacaattcgtaaaagaaaccttcaacctggcataagcaattgaaaatccggaccggcatcaccaatgcccgtccgggttttttgtttatctgaatgatcccggctgcggcggagataatacatgtgaccaattgttagaaagggggattctgatatgcctaggcagccattcaaactgggagatgaggtgtatgtcatttaccggaatccgcatgcagcgaatgtggcgcatataaaggaagctgaagtcgttgatcatccgcttcacgaaggcgaactggcattgtttatgtatgatacatatcacgcctttgccgaagatgatgccgttttttcttcatatgaagaggcggaacggctttaccgtgaattatttgacgggatatgaagacattaccggtatatcacatcctctaaatgcaaaaagtaatggaaatatgcaaaggatgtgtctgtttccaatggtaaaaccgtttgttccccaactcgtctatattgaaccgagagccctggaatatccgcttggaaaagagctgagggataaattttcaaacatgggacttgagatcagggaaacaacttcacacaaccaggtgaggaatatcccgggggaaggccacctgcaaaaatacagaaatgcgaaatccactttggtgatcggcgtcagaaaaacattgaagttcgattcgtcaaaaccgtccgcagaatacgcgatcccgtttgcaacagggtgtatgggtcactgtcattactgctacctgcaaacgacaatgggcagcaagccgtatatcagaacgtacgtcaatgtggaggaaatacttgagcaggcggatcaatatataaaagaaagggctcccgaagatacgcggtttgaagcttcctgcacatccgatatcgtcggaattgaccatttgacacatacgttaaaacgcgccattgagcatttcggtcaaaccgaccatggtaagctgcgtttcgtgacaaaatttcatcatgtcgaccatttgctcgatgccaagcacaacggaaaaacgcgcttccgcttcagcgtgaatgccgaatatgtcattaaaagctttgaacccggcacatccccgttggataaacggatcgaagccgccgtgaaagtagcggaagcgggctatccgctcggttttatcatcgctccgatttatattcatgacggctggcaggaaggctacagagttctgctggaaaagctcgatcgtgcgctgccgcagcatgcgaggcgcgacatcacctttgaaatgatccagcatagattcacgaagccggcaaagagagtcattgaaaaaaactatccaaagacaaagctcgaactggatgaagaaaaacggcgctataaatggggcagatacgggattggcaaatacatttatcagaaggatgaagaagcagagcttcgcagcgcccttgaatcgtatatcgacaactattttcccgaagcaaaaatcgaatatttcacataacagagctttagttgataaagctctgttttttgttttgaaaacattatgttaaaaaaggatttttccactccattaacaccgcataatcaagcgattcctcatcttcaatgtagccgggaatcacacaaactggagagcgtccgcaatgaagcaggaacgagagcactggatcgcgcttttccccgtccaatacagcttgaacatactgttcgggcgtcatttcttcagccgacttgtgataatggggaatccgtccgccgccaatgagacgcttgagccctttaaagaccgtcagttcatacatggattgcatcagccgcattccgatgccgagttttcgatagtcgggggacacggaaatatcgacgacataaagggagtttccatcgttttgatgtgtgccgatatacccgttgtccgtcacttcatcccagctgtggtgcggatgatgcggatcaaaatcagccatgagcgctgtcatcgaaccgatgatgcggc

SEQ ID NO: 40 - protein, 342 aa, Bacillus licheniformis
MVKPFVPQLVYIEPRALEYPLGKELRDKFSNMGLEIRETTSHNQVRNIPGEGHLQKYRNAKSTLVIGVRKTLKFDSSKPSAEYAIPFATGCMGHCHYCYLQTTMGSKPYIRTYVNVEEILEQADQYIKERAPEDTRFEASCTSDIVGIDHLTHTLKRAIEHFGQTDHGKLRFVTKFHHVDHLLDAKHNGKTRFRFSVNAEYVIKSFEPGTSPLDKRIEAAVKVAEAGYPLGFIIAPIYIHDGWQEGYRVLLEKLDRALPQHARRDITFEMIQHRFTKPAKRVIEKNYPKTKLELDEEKRRYKWGRYGIGKYIYQKDEEAELRSALESYIDNYFPEAKIEYFT

SEQ ID NO: 41 - DNA, 905 bp, Bacillus licheniformis
  CDS (501)..(905)
acaaatacagtacaggccgggaagacgggatatacaaggcttgcaaagcggacgctcgtctccatttcatcgaaagacggaaccgatttgatcgccgtcacaatcaatgcccctgacgactggaatgatcatatgaacatgttcaactatgtattcggccagtacaaaacatatatcatcgccaaaaaaggcgagattccgaaattaaaagactctttttacggacatacagcttttattaaacgggatgtcacatatcttttaaacgaagaggaaaaagaagatgtgaaggttgatatcgagcttcttgaaccgaaaaaatcatggcgtaaaaacaaaaaagaaatcccggacatcatcggagaaatgaacgtcatgttcgacggaaaaacgattgcaagcgtaccgatctattatgaaaacgagcgaaacaaaaatccgaaaaaatcgtttttcgagacctttcaatccgtattccaaaaagcggcgggcggttcatcatggtcaatataatctgggtcggcttaacggtgatcggtatggtgtttgcgcttttcaacggcacggttcaggaagttaatgaagctgtatttaaaggatcgaaggaagccgtcacgattgtgatcggactgatgagcgtccttgttttttggctgggggtgatgaaaatcgctgaacagtccgggcttctcgaaaaattcagcaggctgtgccggccgttcatttcgaagctgtttcccgagatccctccggatcatccggcgatgggatatattttatccaatttaatggccaactttttcggattgggcaatgcagcgacaccgctcggtattaaagcgatggaacagatgaaggcgctcaaccggaaccgcagggaagcgagccgctcaatgcacccaggc

SEQ ID NO: 42 - protein, 135 aa, Bacillus licheniformis
MVNIIWVGLTVIGMVFALFNGTVQEVNEAVFKGSKEAVTIVIGLMSVLVFWLGVMKIAEQSGLLEKFSRLCRPFISKLFPEIPPDHPAMGYILSNLMANFFGLGNAATPLGIKAMEQMKALNRNRREASRSMHPG

SEQ ID NO: 43 - DNA, 1568 bp, Bacillus licheniformis
  CDS (501)..(1076)
  CDS (1112)..(1567)
gattagatcttcagttttttgcatctaaaaaaggagtaggttcaacgaaaaacggacgtgactctgaagcgaagcgcctaggtgctaaacgtgcagacggtcaattcgtatctggccgttcaatcctttatcgtcagcgcggaacaaaaatctatccaagtgaaaacgttgggcgcggccgatattacactctatttgcaaaagtcgacggaactgttaaattcgaacctttcggccgtacccccaaaaaagtgagcgtatatcctgtagcctaacctttaaacgaaactccggtcgttctgaccggagttttttacattcagcaccatgacttgcttaaaacaccttcccgacgcctaaataaggccgggtttccgctctgattctgcttcgttaaagtatataaacgtgtttcatttatactgccttctctgttataattcaaagtacaaactgaatcagactcctaaaagagagaccaaacgattgggagtgccaaaatggaagaaacttcgaaaaaacgagaaaagaatatggacgataaggctttgacccatgagcttatccatctgctcagccactcaaggcacgactggatgaataaactgcaattgattaaaggaaacttaacattaaaaaagtatgaccgcgtatttgaaattatcgatgaagtggtcatcgaagctcagcatgaatcaaagctttcaaaccttagaatcccgcgcgcggcgtatgagctgcttacatttaactggatggcccattcgctgacgcttgaatatgaggtgatcggtcaagtcaaggatttgtcagcttatgaagaaaggctcgtcgttctcatcagaaagctgtttgggatttttgacgatgccgttttgaaaggcagcgacaatcatctgacgatcacgctgcagacggacggtccggacgaccgcctcgtcatctttctcgatttccacggcgtattcacaaagctgaccggtatcaaagactttcatcattcactggccgacttttatgaaatcaagcggtttgatgtaacagaccgtgagtgcatcgccgaaattcatatcaagtaaagcggttttttaggaatagaacggaggacattatgtttgttgatcaggtgaaaatatacgtaaaaggcggagacggaggcaacggtatggttgctttccgccgcgaaaaatatgtgccaaaaggaggccctgccggaggtgacggcggaaaaggcggagacgtcgttttcaaagttgacgaaggtctcagcacgctgatggattttagatatcaaagacattttaaggcagcgcgcggagaacacggcatgtctaaaaaccagcacggccgaaatgccgaagacatggttgtgaaagtcccgcccggcacggttgtcattgacgatgatacaaaacaggtcatcgctgatttaacggagcacggacaggaagccgtcatcgcaaaagggggacgcggcggacggggcaatacacgttttgcgacgcctgccaacccggcgccgcagctttctgaaaacggcgaacccggcaaggagcgctatattgttc

SEQ ID NO: 44 - protein, 192 aa, Bacillus licheniformis
MEETSKKREKNMDDKALTHELIHLLSHSRHDWMNKLQLIKGNLTLKKYDRVFEIIDEVVIEAQHESKLSNLRIPRAAYELLTFNWMAHSLTLEYEVIGQVKDLSAYEERLVVLIRKLFGIFDDAVLKGSDNHLTITLQTDGPDDRLVIFLDFHGVFTKLTGIKDFHHSLADFYEIKRFDVTDRECIAEIHIK

SEQ ID NO: 45 - protein, 152 aa, Bacillus licheniformis
MFVDQVKIYVKGGDGGNGMVAFRREKYVPKGGPAGGDGGKGGDVVFKVDEGLSTLMDFRYQRHFKAARGEHGMSKNQHGRNAEDMVVKVPPGTVVIDDDTKQVIADLTEHGQEAVIAKGGRGGRGNTRFATPANPAPQLSENGEPGKERYIV

SEQ ID NO: 46 - DNA, 1849 bp, Bacillus licheniformis
  CDS (501)..(1346)
tcctgcaacgatccagcttgcgggggcggaaattgaacttgttccgaccatctcccgagaagtccggctgaaaagggctttggaatcggtcaaacaaaactatgatttcatgattattgactgcccgccgtcattagggctgcttacaatcaatgcgcttacggcttccgattccgtcgtgattccggtccagtgcgagtattatgcgctggaagggctgagccagctgctcaactctgtccggctcgtgcaaaaacatttaaatacggatctgatgatcgacggcgtattgctgacaatgcttgatgcaagaacgaatttaggcatacaggtcatcgaagaagtgaaaaagtacttccgcgataaagtatacaaaacggttatcccccggaatgtccggctcagtgaagcgccgagtcatggaaagccgatcattttatatgatccccgttccagaggagcggaagtctatttagaattagcaaaggaagtggctgcgaatgcctaaaggtctcggaaaagggattaatgcattgttttcaaatgttgatttatccgaagaaacggttgaggaaatcaagctgcaagacttgcggcccaacccttatcagccaagaaaaacgtttgatgaccaatcgttaaaagatttgaaggagtccattttgcagcacggtgttttgcagcccatcatcgtcagaaagtcaattaaaggctatgacattgtggccggagaacgccgtttccgggctgctgaaaaggccggattggaaaccattcctgcgattgtgcgcgagctgtcggaatccctgatgatggagattgccctattggaaaatcttcaacgagaagacctgtctccgcttgaagaagcaaaagcctatgaatctttgctcaaacatctcgatatgacccaggaacagctggcgaaaaggcttggaaaaagcaggcctcacatcgccaaccacttgcggctgctgacacttcctgaagacgttcaaaagttaatcgacaacggcacgttatcgatgggccatggccgaacattgcttggattgaaaaacaagaaaaagcttgagccgcttgttcaaaaggtcgtgtccgaacagttgaacgtccgccagttggaaaagttaattcaacagttgaacgctgatgttccacgtgaaacaaagaagccgaaacaagtcaaagatgcagtgatcaaggaacgggaatcgtatttgcgaaactattttggaacaccggtgaccattaaaaagcaaaagaaaaaaggcaggatcgaaatcgaattctactcaaatgaagacttggagcgtattctcgaattattggctcaagaagacgcataagcttaaaaaccatctgatcatgtacagatggtttttttatgacattcttccggtcattctttcaattggtgacacatggcgccgctgcgatccggtcttttccagatgcgacagcccgtccgcaagcacatttgccatgctcatgacaagattgagccttgtattttgcaggacaaaatactccataaaaccgctgacattgacaattccgttaatatgcacgtggccgacttccggcaaacttttctgaacgcctgctcccggcttcaaaggccctttgccgatttggaaagaccccacgcttttggttcgtccaagacaggcgtcgatcgcgatcataaaaggattttgatgctgctgatgaatatgatcaagcttttcatttaagttcacggcgtgaaccgggtcggcaagcgttccatagacatgaaaacgtgtcagctgctttgcggagagtttcattcctacgaggggaccgagcgaatctccggtcgagcggt

SEQ ID NO: 47 - protein, 282 aa, Bacillus licheniformis
MPKGLGKGINALFSNVDLSEETVEEIKLQDLRPNPYQPRKTFDDQSLKDLKESILQHGVLQPIIVRKSIKGYDIVAGERRFRAAEKAGLETIPAIVRELSESLMMEIALLENLQREDLSPLEEAKAYESLLKHLDMTQEQLAKRLGKSRPHIANHLRLLTLPEDVQKLIDNGTLSMGHGRTLLGLKNKKKLEPLVQKVVSEQLNVRQLEKLIQQLNADVPRETKKPKQVKDAVIKERESYLRNYFGTPVTIKKQKKKGRIEIEFYSNEDLERILELLAQEDA

SEQ ID NO: 48 - DNA, 3490 bp, Bacillus licheniformis
  CDS (501)..(2987)
ataaacgaaaggcattcgtcttatcccaacggatgcctttttattttctaataaaatttttattaaaatttctattgacggatagggcaatcctttgtaatatagaacttgtgcgttaaaagaaatcaacaacatggcggtgtagctcagctggctagagcgtacggttcatacccgtgaggtcgggggttcgatcccctccgccgctacttatatgaaggcccgttggtcaagtggttaagacaccgccctttcacggcggtaacacgggttcgaatcccgtacgggtcattccggaaaccggcttcttctgaagccggttttttgctgcataaaaatatgcaaaataacgggaatggactcgacttatcaagagtgattgaagcatgctacaaaaagcgtcgaacagttctttgaattcgttaccttcttttgacaaaatcctatttcatctttcgctataatggcaagcaacgaataaacgagtgggagatgagagcatggaaaaagcggaaagaagagtgaacagcccaatagctggacctgctgttcaaaaattgtattcatggtttggcagcatgacgaagcttatgatgcagcatttatattccctctttttttataaagggctgatctatatggtcatcggttttttattgggacgagccttcattctgtcagaggtcattccctttgctcttccatttttcggagcgatgcttttaatcaaaaaagataaagctttccttgcatgcctggcgcttcttgccggagctctgagcatatcgcctcagcattcgctgttcgtgcttgcggctctgtttgcatttgcgatatgttcaaaaatgacgtcccttattataaaagaccgtgtcagaacgctgcctgtcgtcgtctttttggcgatggctgtgacaagatgcggattcgtatatgccgaatacggaacggtttcaggttatcactatattatggctttcgttgaagccggattatcgtttatcctcacattgatttttctgcaaagcctgccgattgtcacatcaaagcgggcgaaacagtcgctgaaaattgaagagatcatttgttttatgattttaatcgcttccgttctcacgggcttgacaggcgtttcatttcaaggcatgcaggctgaactgatattggcccgttatgtcgtgctcgctttcgcgttcatcggaggcgcaagcatcggctgtacagtcggggttgtgaccgggctgattctcagcctctcaaacatcggcaatttatatcagatgagcctgctggctttctcaggccttctcggcggtttgctaaaagaaggaaaaaagttcggcgcagcggtcggcttattgattggatctctattgatttctctgtacggagaaggttcggctgaattagtgccgacgctttatgaatctctgattgcaatcggcctgttccttttaacccctcagtcgattacgaaaaaagtggccaagtatatacctggaacgactgagcacgcccaggaacagcagcagtatgcaaggaaaatccgcgatgtcaccgcccaaaaagtcgatcagttttcgaacgtttttcacgctttatccgaaagcttcgctaccttttatcattcagctccggacgatgaaggaaaagaaaaagagatcgatctgtttttgagcacggtgacagaacattcctgtcagtcatgctataagaaaaacaagtgctgggttcagaactttgataaaacatatgatttgatgaaacgggttatgcaggaaacggaagaaaagcaatattttaaaaaccgcaagctgaaaaaggagtttcatcagcactgctccaaatcaaagcaagtagaagcgctgattgaagacgagctgactcattttagggcgaaccagacattaaaacaaaaggtgcatgacagcagacgtctcgttgcagagcagcttctcggcgtttctcaggttatggcggacttttctcgggaaataaaaagggaaagggagcagcattttattcaagaagagcaaattcgggatgcgctgcagcacttcggcatcgagattcagcaagtcgaaatatacagccttgagcagggaaacatcgatattgaaatgagtatcccgtattgcaacggccatggagagtgtgaaaaaatcatcgctccgatgctgtccgatattttggaagaacaaattatcgtcaaagcagaacagtgcgccggccatccgaatggatattgtcatgttgccttcggttcggcgaagtcatacagggtggtgacaggagccgcgcatgcagcaaaaggcggagggcttgtctccggcgacagctacaatatgatggagctcggcaccggcaaatatgccgccgccattagcgatggtatgggaaatggcgcaagggcccattttgaaagcaatgagacgatcaagctgctggaaaagattcttcagtcgggcatcgacgaaaaagtggcgattaaaacgattaacagcattctttcattaaggacaacagatgaaatttattcgacattggatttatcggtcatcgatcttcaggatgcgagctgcaagtttttgaaaatcggctccaccccgagctttattaaaagaggcgatcaaattataaaagtgcaggccagcaatctgccgatcggcatcattacagaattcgatgtcgatgttgtcagcgagcaattaaaagcgggagaccttttgatcatgatgagcgacggaatctttgaagggccgagacatgtggaaaatcatgatctgtggatgaagcgcaaattgaaatcgctgaaaaccgaggagccgcaggaaatcgccgacttaatcatggaagaagtgatccggacaaggtcgggtctgattgaggacgacatgacggtgattgtcatcaagctggaccataatacgccaaagtgggcctccattccggcgccggcttttttccaaaagaatcaagagatttcttagcattcgtataaatcaaatttcttctggcgatgatggaactaaatcaagatatctttgtccaggaggaataaaaacgatgaaaaaggggcatttgaatcaaatcctgcttttgacggacggctgttcaaaccgcggcgaagacccgcaggccatggctgcctttgcgaaagagcagggaattaccgtgaatgtgattgggattatggacgagcatgaaatggatcaggaggcgatgaaagaagtcgaagggatcgctctcgcaggcggaggagttcaccaggtggtttacacgtcgcagctgtcgcagaccgttcaaatggtgacaaaaaaggcgatgacgcaaacccttcaaggcgtggtcaacagtgagctcaaacaaattctcggcaagcataccgaaatggatgaactgcctcctgataaacgcggtgaagtcatggaagtcgttgacgagcttggtgagaccgtgcatcttcatgtactggttcttgtcgatacaa

SEQ ID NO: 49 - protein, 829 aa, Bacillus licheniformis
MEKAERRVNSPIAGPAVQKLYSWFGSMTKLMMQHLYSLFFYKGLIYMVIGFLLGRAFILSEVIPFALPFFGAMLLIKKDKAFLACLALLAGALSISPQHSLFVLAALFAFAICSKMTSLIIKDRVRTLPVVVFLAMAVTRCGFVYAEYGTVSGYHYIMAFVEAGLSFILTLIFLQSLPIVTSKRAKQSLKIEEIICFMILIASVLTGLTGVSFQGMQAELILARYVVLAFAFIGGASIGCTVGVVTGLILSLSNIGNLYQMSLLAFSGLLGGLLKEGKKFGAAVGLLIGSLLISLYGEGSAELVPTLYESLIAIGLFLLTPQSITKKVAKYIPGTTEHAQEQQQYARKIRDVTAQKVDQFSNVFHALSESFATFYHSAPDDEGKEKEIDLFLSTVTEHSCQSCYKKNKCWVQNFDKTYDLMKRVMQETEEKQYFKNRKLKKEFHQHCSKSKQVEALIEDELTHFRANQTLKQKVHDSRRLVAEQLLGVSQVMADFSREIKREREQHFIQEEQIRDALQHFGIEIQQVEIYSLEQGNIDIEMSIPYCNGHGECEKIIAPMLSDILEEQIIVKAEQCAGHPNGYCHVAFGSAKSYRVVTGAAHAAKGGGLVSGDSYNMMELGTGKYAAAISDGMGNGARAHFESNETIKLLEKILQSGIDEKVAIKTINSILSLRTTDEIYSTLDLSVIDLQDASCKFLKIGSTPSFIKRGDQIIKVQASNLPIGIITEFDVDVVSEQLKAGDLLIMMSDGIFEGPRHVENHDLWMKRKLKSLKTEEPQEIADLIMEEVIRTRSGLIEDDMTVIVIKLDHNTPKWASIPAPAFFQKNQEIS

SEQ ID NO: 50 - DNA, 1928 bp, Bacillus licheniformis
  CDS (501)..(1427)
atcaccggcttgaaaccggccgaagatctcgagctcaaaacgggagaaaccgtgaaaatcgagtttgaaagcgccgctgatttggatgctgtctttgtgatcagaatgccgctgaccaatttcaaaaccgctgcccaaaacgtaacggagctgccgatcagagaagtctcaaaaggaaaatatgaaggatattggaccgctacttcaactgcaaaagcaaaaggagcggaaatcgaggtcatcgtcagagatgattacggcaatgaaacgagacaaacggcaaaaggcaagctgtatatcaatgaaaagctgaaataaaggtgaaaagacgctgtctttaatggcagcgtttttttcgttttacgatcgacaaattcagtacgaaaacttcaaaaaatgtacgatttacgcaacattaattgacagactttacctttgggcttgatttatacttaggaaaacaaacactaaggtcaccgagccgcagaaaggggaaggatgtggaaatctatttagatgcgatatggctgttaaacttttgttttgacttgctgcttttaatgatgaccgcatttattttaaagcgaagggttaaaaagcggaggctgatcctaggggcatttgtcgcgtcaagcatcgttctgtttatgtttacacctttttcaccgtacgtccttcatcctgccggcaaactgtcgttttcggttgtgatcgttcttgtggcatttggttttaagcggttccggttttttttgcagaatttgttttctttttattttgccacttttttaatgggaggagggattatcggagcgcattctttgcttgaaacggattcgatcatggaaaacggcgtctttatgacgaattggtccggttttggagaccccgtcagctggctgtttgtctgtgtgggttttgcggctgtatggctgttttcaaaaaagcgttttgaagatgctgaagcgaagaaaattcaatacgaagaacgcgtccgcctagaggcctgcattggtgaacatacgcttcatttcaccggattgattgactccggaaaccagctctacgatccaatcacaaaaacgcccgtcatgatcgtcaatattgaaaaattgaaagttgtattgggagaagaggcaagtgtgaccatcaaggaaatgagcccgcttgatgccgtcgggaaactggatgaagcactgccgtatatcgggcggatccgcctgattccgtaccgcggggtcggccatcagcatcagtttctgctctgcttaaagccggatcatgtgctcgtttgtacggaaagagaagtgattgaagcgccgaaatgcctgattggcatcagcacatcaccgctttccgctgacggcgaatttgacgccatcgtccatccgaaaatgctggccggaaacccggtcaaacacgtttcttaaacttgaagtctgttacattatcatactcctgaagacgtttatttagaagggggaggaagatgaaaaaactaaaattaaggttaacctatctatggtacaaacttttaatgaaactggggctgaaaagcgacgaaatttattatatcggcggaagcgaggcgcttcccccgccattgtcaaaagatgaagagcaggtgcttctccataagctgcctgacggtgatcaggcggcacgagcgattttgattgaacgaaatctcagactggtcgtgtacatcgcgagaaaatttgaaaatacaggaatcaatatcgaggatttaatctccatcggcacgatcgggctcatcaaagcggtgaatacgtttaatcccgagaaaaaaatcaaactggctacatatgcttccagatgcattgaaaatgaaattttgatgtatttaagaagaaacaataaaatccgttcagaggtatcattcgacgaaccgctgaacatcgattggg

SEQ ID NO: 51 - protein, 309 aa, Bacillus licheniformis
VEIYLDAIWLLNFCFDLLLLMMTAFILKRRVKKRRLILGAFVASSIVLFMFTPFSPYVLHPAGKLSFSVVIVLVAFGFKRFRFFLQNLFSFYFATFLMGGGIIGAHSLLETDSIMENGVFMTNWSGFGDPVSWLFVCVGFAAVWLFSKKRFEDAEAKKIQYEERVRLEACIGEHTLHFTGLIDSGNQLYDPITKTPVMIVNIEKLKVVLGEEASVTIKEMSPLDAVGKLDEALPYIGRIRLIPYRGVGHQHQFLLCLKPDHVLVCTEREVIEAPKCLIGISTSPLSADGEFDAIVHPKMLAGNPVKHVS

SEQ ID NO: 52 - DNA, 1922 bp, Bacillus licheniformis
  CDS (501)..(1421)
cggctctttttttgctgtctgaaatcttttacctctcacatgccaaatagaaaaatcggaagactactttttcaaaggagagcatagagtgtaaaaaaagaggaagtgttactggaggtttaagatcatgaagcttttctttggacaagtcaatccgacggttttgacaatggcggcgttaagggtggtatcatctttgatcgaactgacggcggctgttgtgatgcttttgacaaacgacgtcagaaaagctgtggcggtcaacagcgtactggccatggtcgggccgctcatctttattattacaatgacaatcggcatctatcagattgcagggcagctttcttacgcaaagctgattttgatctttatgggagtggttttgatcatcgcggggatctataaatagcgacacatgataagagaggccgacttgtcataatgtcttcctttgatcatacatttttatagaagacaagcaaaaagaggagggagtgtttttgcaccacatcacagagattctccccgatacgatcaaacgcgcgctcagcggtcttggcgaccatgaaatcgatcagatagaagaaattcgggttcggacaagtcgtccgctggaactggtgaacaaaggaaagccgcgctttctcccttatgtggcgacgcctgaagactcggcgcttcttttaaacagattgggaaattacagcatgtatacactggaagaggaattgaaaaaaggatatgtcacgatcagaggcggacaccgcgtggggcttgccggccgggttgtcgtcgaaaacggggccgtcaaaggaatcagagaaatatcatcatttaatattcgcattgccaaagaaaaaatcggcatttccaaaccgtatgtcccccatttatttcaaaactcgtggctgaacacgctgattatcggtccgccgcaaaccggaaaaacaacactgctcagagacctcgccaggctgatcagttcgggaagcggcaacgcccctgccaaaaaagtggggattgttgacgaaaggtctgaaatcgcaggctgtgtaaacggcataccgcaatatcggctcggcgaccgggcagacatccttgacgcctgtccaaaagcggaagggctgatgatgatgatcagatcgatgagtccggaggtaatgatcgccgatgagatcgggagaatggaagacgcagaagcgctcttggaagcggtccacgcgggggtgactgtcatcgtttcggctcacggctacacatatgcagatctcgccaggcgtccatcattgaaaatgcttcaagagcaccgggtttttgagcgaatcgtggaactttccagaaagaacggtcccggcagcctgagccgcatcctaaatgggaacggagagccgctcggggcagcaaagaggatgttatcatgctgaagcttttaggtgccgtgcttattttggcagcagccacatggacaggatttgaaatggcgaagcctttcagggaaaggccgaagcaaatccgccagctgttggccgctttgcagtctttggaggctgaaatcatgtacgggcatacaccgctccgtcaggcatcaaaacagatcgcacaccagcttaccgagccggtagcctctttgtttcagacatttgcagaacagcttgaaaaaggcagcgcttcagcagggacggcatgggaagacagcctggagaaagtatggcccgaaacggctcttaaaaagaaagaatacgagattttacggcaattcggcgaaacgctgggccgtcatgatctgatttctcagcaaaaacatatcaaactggcgttaacccatttagagacagaggaagctgaagcaaatctcgcccaggcgaaaaatgaaaaaatggtcaaaagccttggatttttgacgggactgctactgattcttc

SEQ ID NO: 53 - protein, 307 aa, Bacillus licheniformis
LHHITEILPDTIKRALSGLGDHEIDQIEEIRVRTSRPLELVNKGKPRFLPYVATPEDSALLLNRLGNYSMYTLEEELKKGYVTIRGGHRVGLAGRVVVENGAVKGIREISSFNIRIAKEKIGISKPYVPHLFQNSWLNTLIIGPPQTGKTTLLRDLARLISSGSGNAPAKKVGIVDERSEIAGCVNGIPQYRLGDRADILDACPKAEGLMMMIRSMSPEVMIADEIGRMEDAEALLEAVHAGVTVIVSAHGYTYADLARRPSLKMLQEHRVFERIVELSRKNGPGSLSRILNGNGEPLGAAKRMLSC

SEQ ID NO: 54 - DNA, 1511 bp, Bacillus licheniformis
  CDS (498)..(1010)
  CDS (1036)..(1239)
  CDS (1255)..(1509)
attatcggtccgccgcaaaccggaaaaacaacactgctcagagacctcgccaggctgatcagttcgggaagcggcaacgcccctgccaaaaaagtggggattgttgacgaaaggtctgaaatcgcaggctgtgtaaacggcataccgcaatatcggctcggcgaccgggcagacatccttgacgcctgtccaaaagcggaagggctgatgatgatgatcagatcgatgagtccggaggtaatgatcgccgatgagatcgggagaatggaagacgcagaagcgctcttggaagcggtccacgcgggggtgactgtcatcgtttcggctcacggctacacatatgcagatctcgccaggcgtccatcattgaaaatgcttcaagagcaccgggtttttgagcgaatcgtggaactttccagaaagaacggtcccggcagcctgagccgcatcctaaatgggaacggagagccgctcggggcagcaaagaggatgttatcatgctgaagcttttaggtgccgtgcttattttggcagcagccacatggacaggatttgaaatggcgaagcctttcagggaaaggccgaagcaaatccgccagctgttggccgctttgcagtctttggaggctgaaatcatgtacgggcatacaccgctccgtcaggcatcaaaacagatcgcacaccagcttaccgagccggtagcctctttgtttcagacatttgcagaacagcttgaaaaaggcagcgcttcagcagggacggcatgggaagacagcctggagaaagtatggcccgaaacggctcttaaaaagaaagaatacgagattttacggcaattcggcgaaacgctgggccgtcatgatctgatttctcagcaaaaacatatcaaactggcgttaacccatttagagacagaggaagctgaagcaaatctcgcccaggcgaaaaatgaaaaaatggtcaaaagccttggatttttgacgggactgctactgattcttctattgatgtaatgaagaggggagcatacacgaaatgggagtagacgtaaatattatttttcaaattgccggcgtcgggatcgtcgtcgcttttcttcacaccatactggatcaaatggggaagaaggaatatgcccaatgggtcacgcttttaggattcatttatatattgttcatggtggcaactgttgtcgatgatctattccaaaagataaaagctgtctttctatttcaaggataggggggctcactcattgaaatcgttcaaatcgtaggactgggaatgatcgccaccttcctcagcttgattgtgaaagagcaaaaaccgacgtttgcttttttgattgtcgtttttgccggctgcacgatttttttattcttagtagatcaggtctacgaaatcattcggatgattgaaaaaatagctgccaatgccaacatcaacatgatgtatgtcgaaacgattttgaagattatcgggattgcttatattgcggagtttggcgccca

SEQ ID NO: 55 - protein, 171 aa, Bacillus licheniformis
MLKLLGAVLILAAATWTGFEMAKPFRERPKQIRQLLAALQSLEAEIMYGHTPLRQASKQIAHQLTEPVASLFQTFAEQLEKGSASAGTAWEDSLEKVWPETALKKKEYEILRQFGETLGRHDLISQQKHIKLALTHLETEEAEANLAQAKNEKMVKSLGFLTGLLLILLLM

SEQ ID NO: 56 - protein, 68 aa, Bacillus licheniformis
MGVDVNIIFQIAGVGIVVAFLHTILDQMGKKEYAQWVTLLGFIYILFMVATVVDDLFQKIKAVFLFQG

SEQ ID NO: 57 - protein, 85 aa, Bacillus licheniformis
IEIVQIVGLGMIATFLSLIVKEQKPTFAFLIVVFAGCTIFLFLVDQVYEIIRMIEKIAANANINMMYVETILKIIGIAYIAEFGA

SEQ ID NO: 58 - DNA, 1207 bp, Bacillus licheniformis
  CDS (501)..(704)
agccacatggacaggatttgaaatggcgaagcctttcagggaaaggccgaagcaaatccgccagctgttggccgctttgcagtctttggaggctgaaatcatgtacgggcatacaccgctccgtcaggcatcaaaacagatcgcacaccagcttaccgagccggtagcctctttgtttcagacatttgcagaacagcttgaaaaaggcagcgcttcagcagggacggcatgggaagacagcctggagaaagtatggcccgaaacggctcttaaaaagaaagaatacgagattttacggcaattcggcgaaacgctgggccgtcatgatctgatttctcagcaaaaacatatcaaactggcgttaacccatttagagacagaggaagctgaagcaaatctcgcccaggcgaaaaatgaaaaaatggtcaaaagccttggatttttgacgggactgctactgattcttctattgatgtaatgaagaggggagcatacacgaaatgggagtagacgtaaatattatttttcaaattgccggcgtcgggatcgtcgtcgcttttcttcacaccatactggatcaaatggggaagaaggaatatgcccaatgggtcacgcttttaggattcatttatatattgttcatggtggcaactgttgtcgatgatctattccaaaagataaaagctgtctttctatttcaaggataggggggctcactcattgaaatcgttcaaatcgtaggactgggaatgatcgccaccttcctcagcttgattgtgaaagagcaaaaaccgacgtttgcttttttgattgtcgtttttgccggctgcacgatttttttattcttagtagatcaggtctacgaaatcattcggatgattgaaaaaatagctgccaatgccaacatcaacatgatgtatgtcgaaacgattttgaagattatcgggattgcttatattgcggagtttggcgcccagctgacaaaggatgccggacagggtgcgattgcttcgaagatcgaattggcaggcaaaatcctcatcttagtcatggctgtgcctattttaaccgtgattatcgaaacgatcatcggactcatcccttccatgtcttagtcagaaaggaggatttcctgagtgaagcgttttctgttctggctcttggtcatcggaatcgtatgctttggagcgcataatgtacaagcttc

SEQ ID NO: 59 - protein, 68 aa, Bacillus licheniformis; identical to SEQ ID NO: 56

SEQ ID NO: 60 - DNA, 2153 bp, Bacillus licheniformis
  CDS (501)..(1703)
tgttcatggtggcaactgttgtcgatgatctattccaaaagataaaagctgtctttctatttcaaggataggggggctcactcattgaaatcgttcaaatcgtaggactgggaatgatcgccaccttcctcagcttgattgtgaaagagcaaaaaccgacgtttgcttttttgattgtcgtttttgccggctgcacgatttttttattcttagtagatcaggtctacgaaatcattcggatgattgaaaaaatagctgccaatgccaacatcaacatgatgtatgtcgaaacgattttgaagattatcgggattgcttatattgcggagtttggcgcccagctgacaaaggatgccggacagggtgcgattgcttcgaagatcgaattggcaggcaaaatcctcatcttagtcatggctgtgcctattttaaccgtgattatcgaaacgatcatcggactcatcccttccatgtcttagtcagaaaggaggatttcctgagtgaagcgttttctgttctggctcttggtcatcggaatcgtatgctttggagcgcataatgtacaagcttcgccaaaagaagcggagccggctggggaaaccgctgcagaagaatcggcagaagccattgcaagagagcaggctgaaggtttggaactagaccgggtcggggagttctggaacaacattttgacagagtatgggggacaccttcccgaaagtcaaaaaggaagcctgcttgaatttgtcaaaggagaaaagcacttttcgcctgaggaatggggcaaagcgctgttttcctacttgttccatgaagtgctggctaacgggaaactgctggggacgctgatcctgttgaccatcttctgcgtcctgcttcagcttttgcaaaacgcgtttcaacaaagcaccgtcagcaaagtggcgtatgcaattgtctacatggtgctgattattcttgcgctcaacagctttcgggttgccgtcacatatgcgaatgaagcgattcagacgatgacaagctttatcctgtcgctcgtacctctgcttctggcgctgatggcgacttcggggggagccgcctcagccgcattctttcatccggtcattctttttctcatgaacacgagcggcttgtttatccaatatatcgtgttgccgcttttatttttatcagcgattttaagcattgtcagcacgatgacggaccaatataaagtcacacagctggcccagctcctcagaaatgcggcgatcggcacgctggctgcatttttgaccgtattcctcggtgtcatctcggttcagggcgcctcagccgcagtgacggacggcattactttgcggacggcaaaattcattaccggaaacttcatccccgtattgggccgcatgtttaccgaagcgacagacacggtgatcagcgcgtctctcctgctgaaaaacaccgtcgggatactcggtgtggcaatcttaatttgcatcgcagcctttcccgcgatcaaaatcctttccctcgcgctcatatacaaaattgccgcggcggttctccagcctctcggaggcggcccggttatcagctgcctggatgtcatcagcaaaagcgtcatctacattttcgcggccatggccatcgtttcgctgatgtttttcttaagcttaaccgtgatcattacagcggggaatctgacgatgatgatgaagtagggagggatgagatggaatttctgacagagtggctcacgaatattattctatttattctgatggcgatcgtcatcgatatgcttctgccgaattcgagcatgcaaaaatacgcgaaaatggtgatcagcctgctcttgatcgttgtaatactgaacccgatcttctctttattcaggacagatccggatgtgatttttgagaagcttacaaaaaacggacaagttcagtcaaacgaaataaaaaatcagctgaattcagaaaaaaaagaaatacaagcctcacaacaagcatatatcttagaacagatggctgttcaattggaaaagaacgcagagggcaggtttacaagcgacaaatacaagatagaccgagtcgaggtctcttctgacagccagctgaaaacagagaaagacctcagtaagcatgcggaagtctcggtattcttga

SEQ ID NO: 61 - protein, 401 aa, Bacillus licheniformis
VKRFLFWLLVIGIVCFGAHNVQASPKEAEPAGETAAEESAEAIAREQAEGLELDRVGEFWNNILTEYGGHLPESQKGSLLEFVKGEKHFSPEEWGKALFSYLFHEVLANGKLLGTLILLTIFCVLLQLLQNAFQQSTVSKVAYAIVYMVLIILALNSFRVAVTYANEAIQTMTSFILSLVPLLLALMATSGGAASAAFFHPVILFLMNTSGLFIQYIVLPLLFLSAILSIVSTMTDQYKVTQLAQLLRNAAIGTLAAFLTVFLGVISVQGASAAVTDGITLRTAKFITGNFIPVLGRMFTEATDTVISASLLLKNTVGILGVAILICIAAFPAIKILSLALIYKIAAAVLQPLGGGPVISCLDVISKSVIYIFAAMAIVSLMFFLSLTVIITAGNLTMMMK

SEQ ID NO: 62 - DNA, 1696 bp, Bacillus licheniformis
  CDS (501)..(1193)
cttgatcgttgtaatactgaacccgatcttctctttattcaggacagatccggatgtgatttttgagaagcttacaaaaaacggacaagttcagtcaaacgaaataaaaaatcagctgaattcagaaaaaaaagaaatacaagcctcacaacaagcatatatcttagaacagatggctgttcaattggaaaagaacgcagagggcaggtttacaagcgacaaatacaagatagaccgagtcgaggtctcttctgacagccagctgaaaacagagaaagacctcagtaagcatgcggaagtctcggtattcttgaaaccagcatcggaaaaaacggtccaagccgtcgctcctgtcgagatcaatacggaccggagctaccagtccatgcaggaaagagaaaagaaagagacgggggaagtcagagaacagctagcaggcatctgggaaataagccccgacaagattacagttcatatcgaagggggagaacgaagcggcaatgaataaaagaacctggatcgaaaagctgatcggccacctgctcccgaaagacgagaaagacggaaaaaagctgacgaaatatcactactttctgctgctttttgttctcggcgtttccttcatgctcgtcagccagatcttctcttccgaaccttcccaagagccagcggcagatcagccggcggcttcacaaaaagctacgtctgaaagcaccgtacagagcggtgaaggagaaaaagaagtgttcaagcccgcctcagatgacaaaccgaaggaatcgatccaagattacgaacaggaatatgaaaatcagctcaaagacatattggaaaccatcatcggcgttgaggacgtgtcaatcgtcgtcaatgttgatgcaacctcattgaaaatattcgagaaaaacagaaaaacccaggaaacttcaacgaatgagacagataaacagggaggcaagcggacggtgtctgaaatgtcttcagacgaagaaatcgtcatcatcaaaaacggagataaagagacgcctgtcgtcgttcagacgaaaaagcccgatatcaggggtgttctcgttgtcgctcagggagtcgacaacgttcaaataaaaaagaccattattgaagcagtgacaagggttcttgatgttccgagccaccgcgtcgctgttgcccctaaaaaaatgaaggaggattcataaatgatgctgaaaaaacaaacggtttggcttttaaccatgttaagtctcgtcgttgtactgagtgtctactacattatgtcgcccgaaggagaaaatgtcgtcacggttgatgacaaggaacaagttgccgctgaaaaagaaaaaccgatgaaagaagagcctgccaaggatggcaaagatgataccgcgcctgctaaagacaaaactaaagggaaagatacaaaagataaagaaacgtctgcgagtgagcagaacggagaggttgtcacagaggaatcatcgggtgatgaagatttattcacaacataccgcatggaaatggacgatcagcgcagcagggagagggaggaattaaccgaaatcgtcagaagcgataaagcgacggcaaaagaaaaaagcgaagcttacgacaagatgacagagctcagcgaagctgaaggaacggaaaagacccttgaaaccctcatcaaaacaaaaggctattaagacgccttggtcaa

SEQ ID NO: 63 - protein, 231 aa, Bacillus licheniformis
MNKRTWIEKLIGHLLPKDEKDGKKLTKYHYFLLLFVLGVSFMLVSQIFSSEPSQEPAADQPAASQKATSESTVQSGEGEKEVFKPASDDKPKESIQDYEQEYENQLKDILETIIGVEDVSIVVNVDATSLKIFEKNRKTQETSTNETDKQGGKRTVSEMSSDEEIVIIKNGDKETPVVVQTKKPDIRGVLVVAQGVDNVQIKKTIIEAVTRVLDVPSHRVAVAPKKMKEDS

SEQ ID NO: 64 - DNA, 1062 bp, Bacillus licheniformis
  CDS (498)..(980)
ctacgtctgaaagcaccgtacagagcggtgaaggagaaaaagaagtgttcaagcccgcctcagatgacaaaccgaaggaatcgatccaagattacgaacaggaatatgaaaatcagctcaaagacatattggaaaccatcatcggcgttgaggacgtgtcaatcgtcgtcaatgttgatgcaacctcattgaaaatattcgagaaaaacagaaaaacccaggaaacttcaacgaatgagacagataaacagggaggcaagcggacggtgtctgaaatgtcttcagacgaagaaatcgtcatcatcaaaaacggagataaagagacgcctgtcgtcgttcagacgaaaaagcccgatatcaggggtgttctcgttgtcgctcagggagtcgacaacgttcaaataaaaaagaccattattgaagcagtgacaagggttcttgatgttccgagccaccgcgtcgctgttgcccctaaaaaaatgaaggaggattcataaatgatgctgaaaaaacaaacggtttggcttttaaccatgttaagtctcgtcgttgtactgagtgtctactacattatgtcgcccgaaggagaaaatgtcgtcacggttgatgacaaggaacaagttgccgctgaaaaagaaaaaccgatgaaagaagagcctgccaaggatggcaaagatgataccgcgcctgctaaagacaaaactaaagggaaagatacaaaagataaagaaacgtctgcgagtgagcagaacggagaggttgtcacagaggaatcatcgggtgatgaagatttattcacaacataccgcatggaaatggacgatcagcgcagcagggagagggaggaattaaccgaaatcgtcagaagcgataaagcgacggcaaaagaaaaaagcgaagcttacgacaagatgacagagctcagcgaagctgaaggaacggaaaagacccttgaaaccctcatcaaaacaaaaggctattaagacgccttggtcaacgccgacggcgataaagtcaatattacggtgaaggcgaaggagcactcgaaagccgcctgcaccg

SEQ ID NO: 65 - protein, 161 aa, Bacillus licheniformis
MMLKKQTVWLLTMLSLVVVLSVYYIMSPEGENVVTVDDKEQVAAEKEKPMKEEPAKDGKDDTAPAKDKTKGKDTKDKETSASEQNGEVVTEESSGDEDLFTTYRMEMDDQRSREREELTEIVRSDKATAKEKSEAYDKMTELSEAEGTEKTLETLIKTKGY

SEQ ID NO: 66 - DNA, 3346 bp, Bacillus licheniformis
  CDS (501)..(2843)
gtattcaaaaaacaatttaacccgtgacatcgagacgaatgtcataggaaaaaatgcggttaaatacggattaatcgatgaaaaccggcgagagacagacaggcgattcaaaagctgatgaatataatcgaacaaaacaaggacgcacaggaagagataatccaatgattctgtataaaaaaatgccgcaggaaatcgtgttcgcagggcaggcggaaaactcgaacttaaaacagatcgatgtaaacagcgtaccacttttagtcgagatgaacggagaggaagcaaggaacgttcagagttctcagcacgaacccgatggattttttaaaacaagaaacggcccctgggcagacgcttaaactgacattttataaatagctggagtgtctcaaggataaatatgctataataggggaatccagaggaaaatcgcagccgaaaaaaggctgctttctctttgtttttacattttttaacacgcagtaaggtgatggaacatggcaaaaagaaaacgaaaatcaacaaagaaacaaaaacaaggaaaaaaacggatccatcttaaatttgaattgtacggattaatctgtatcgccatctcgattattgcggttttgcagcttggcgtagcagggcaaacgttcatttacatgttccgctttttcgccggtgaatggttcatcctttgccttctcggcctctttttaacgggcttgtctttattttggaaaaagaaaacacccagttttttgacgaggagaaaagcgggcctttactgcatcattgcaagcatgctgcttctttcacatgtccagctgtttcagcatttgaccgaaaggggaatggttcagtctccgagcgtgatccaaaatacgtgggagctgtttctgatggatgtaaaaggcgagacaggatcgcctgatcttggaggcggaatgattggagcccttttattcgcggcgtcatattttctgtttgcatctgcaggatctaaaatcatcgccgtcttcctgatcttgatcggccttcttttgattacggatcggtcgcttcaggagacgctgatcaaatggatgaccccggtcgcctccttcatgaaaaaccagtggcaggcctttttagcagatcttaaacaattgaaaaacagctcgccgaaaaagaaatccggaaaaaaacaaaagacgcagagaaaaccgaaagtgtctgaagagcctgtacaagaagcggaccttgatccagatccggttattcaatcagaaccgattatttcaagcttttccgaccgtgatgaaaagcccgaagttcaagcttacgaagctccggcggctcctgctgaacctcctgctgagcccgaaatcggtgaggaaatgcaggcctccggcgcgcccgaaatcacgtttacagagctagaaaacaaggattaccagcttccgtcgattcaattgctggatgatccgaagcacacagggcagcaggcggataaaaagaatatttacgacaatgccaggaagctggaaaggacgtttcaaagcttcggagttaaggcgaaagtcacccaggttcatctcggcccggccgtcacgaaatatgaagtctatcctgatgtgggcgtcaaagtcagcaaaattgtcaacttaagtgacgacttggctttagcgctcgcggccaaggatatccgcatcgaagccccgatccccggaaaatcggcgattggaatcgaagtgccgaatgcggaagtggcgatggtttccttgaaagaagtgcttgaatcgaaactgaatgaccggccggatgcaaagctgatgatcggcctcggccggaacatttccggagaagcggtattggcagagctgaacaaaatgccccaccttcttgttgcaggagcgaccggaagcgggaaaagcgtctgtgtcaacgggatcattacaagcattttgatgagggcaaagccccacgaagtgaagatgatgatgattgatccgaaaatggtcgagctcaatgtctacaacgggattccgcatttgctcgctcccgtcgtgacagacccgaaaaaagcatcgcaggctttgaagaaagtcgtcaacgaaatggagcggcgctacgaattgttttctcacacgggaacgagaaatatcgaagggtataacgactatattaaacggatgaatgccgcagaagaagcaaagcagccggagcttccatacatcattgtgattgtggacgagcttgccgacctgatgatggtcgcttcctctgatgttgaagactcgatcacaaggctttcgcaaatggccagggcggcgggcatccacctgatcattgcgacgcagaggccttcggtcgatgttatcacaggggtcattaaagccaacattccgtcaaggatcgctttcagcgtatcgtctcagaccgactccaggacgattcttgatatgggaggcgctgaaaaacttctcggcagaggggacatgctgtttctccctgtcggcgccaataaaccgctccgcgttcaaggtgcctttctgtcagacgaagaagttgaaaaagttgtcgatcacgtcatcagccagcaaaaagcccaataccaagaagaaatgattccagaagagacgcaggaaacggtcagcgaagtgacagacgacctttatgacgaagcggtcgcacttgtggtcagcatgcagacggcttctgtatccatgctgcaaaggagattccgcatcggctatacaagagcggcgcggcttatcgatgccatggaagagcggggaatcgtcggcccatatgaaggatcaaaaccccgtgaagttctcttgtcaaaagagcaatacgaagaactctcttcttgagaagagagttcttgtttaacataatttcattatgtaaactaaaaaacatctatttatttatttgacaaaacatgatatagttatcctcaattaaagataatttgaatctgatctgtcagacggagggaaaacatgtcgataaaagctgacaatcaacggttatgtttaaaggtgattgatcggataaaagatgatattcaaaatggggtcttttgcgaaaatgaacggctcccgagtgaatttgagctgtcaaagatgcttggtgtgagcagaacggctttgcgtgaggcgcttagaatactggaagaagaaaacgtcatcatcagaaggcatggagtcggacattttgtaaatgccagaccgttatttctatcaggtattgagcagctgaacagcgtcacaaaaatgatcgagcaggcaagcatgacgccgggaaccatttttatgtcctcacaggttaccgctcccactgaagaagatatgctccggtttcaatatgc

SEQ ID NO: 67 - protein, 781 aa, Bacillus licheniformis
MAKRKRKSTKKQKQGKKRIHLKFELYGLICIAISIIAVLQLGVAGQTFIYMFRFFAGEWFILCLLGLFLTGLSLFWKKKTPSFLTRRKAGLYCIIASMLLLSHVQLFQHLTERGMVQSPSVIQNTWELFLMDVKGETGSPDLGGGMIGALLFAASYFLFASAGSKIIAVFLILIGLLLITDRSLQETLIKWMTPVASFMKNQWQAFLADLKQLKNSSPKKKSGKKQKTQRKPKVSEEPVQEADLDPDPVIQSEPIISSFSDRDEKPEVQAYEAPAAPAEPPAEPEIGEEMQASGAPEITFTELENKDYQLPSIQLLDDPKHTGQQADKKNIYDNARKLERTFQSFGVKAKVTQVHLGPAVTKYEVYPDVGVKVSKIVNLSDDLALALAAKDIRIEAPIPGKSAIGIEVPNAEVAMVSLKEVLESKLNDRPDAKLMIGLGRNISGEAVLAELNKMPHLLVAGATGSGKSVCVNGIITSILMRAKPHEVKMMMIDPKMVELNVYNGIPHLLAPVVTDPKKASQALKKVVNEMERRYELFSHTGTRNIEGYNDYIKRMNAAEEAKQPELPYIIVIVDELADLMMVASSDVEDSITRLSQMARAAGIHLIIATQRPSVDVITGVIKANIPSRIAFSVSSQTDSRTILDMGGAEKLLGRGDMLFLPVGANKPLRVQGAFLSDEEVEKVVDHVISQQKAQYQEEMIPEETQETVSEVTDDLYDEAVALVVSMQTASVSMLQRRFRIGYTRAARLIDAMEERGIVGPYEGSKPREVLLSKEQYEELSS

SEQ ID NO: 68 - DNA, 1045 bp, Bacillus licheniformis
  CDS (501)..(1043)
tcaaagcggcgggattataaagatatcggcaagctttcgatcgggccgggaatatttaatatcaatgaacctgtcattttcggacttccggtcgtgctcaatccaatcttcatgattccctttattatcgttccggcagtcaatactgtcatcggctatttgttcatcaagtttcagctgattccgccgatcgcatacgctgttccgtggacaacgccagggccgttgattccgtttctcgggaccggaggaaactggcttgcgctcggcgtcggctttctctgcctcgccatttcaacgatgatttatctgccgtttgtgatggctgccaacaagactgtgaatacggacagggagcattccgcggaaaacaggaaggaatcataactttagacggggcgccttttacgggcgcccgtctttttttaaaaaaagtcatgcggctctcttttctctcatacaatctattaaaatcaaaagcacgtctgggaggaagatacatgcggaagcccacaatcaaagagctcatctttcaacatatgaaggaccatctgtcgatctatttatttgtttctgtgctgttcttaatgggtgtgattttcggcgcggtcatcgtcaacagcatgacgatcggtcaaaaagaagatttgttctactatttgaatcaattttttggacagctttccgaaggaaaagcagccagctcaaaggaaatgtttttgcagagctttcttcataatatgaaatatttaggcttaatgtggattctcgggatatccatcatcggtctgcccgtcatttttatcatggtcttcttaaaagggatcgtcgtcggatttacagtcggctttttggtcaatcaaatgggaatcaacggctttttcctgtcttttgtctccgtgctcccgcaaaatattctgctgatcccggcgtacttgatcatgggcacctgcgccatcgccttttcgatgaggctcatccgccagctttttgtaaacgcagccttcagaagcacctgtccatgtgttgtgccgcgggtagccga

SEQ ID NO: 69 - protein, 181 aa, Bacillus licheniformis
MRKPTIKELIFQHMKDHLSIYLFVSVLFLMGVIFGAVIVNSMTIGQKEDLFYYLNQFFGQLSEGKAASSKEMFLQSFLHNMKYLGLMWILGISIIGLPVIFIMVFLKGIVVGFTVGFLVNQMGINGFFLSFVSVLPQNILLIPAYLIMGTCAIAFSMRLIRQLFVNAAFRSTCPCVVPRVA

SEQ ID NO: 70 - DNA, 1108 bp, Bacillus licheniformis
  CDS (500)..(1108)
agtggtcgatgccgtcacgatcacgagcgacacgattgattacatgctgaagcattttggaagagagatgagagacgacagtccgtccaggtcgctcgttcccgcggggatgagctttgggaaaagaaaggtcctcaccgaagaagaccttcccgatgaagagcaccgcaaatcgtttctcggtatagtcggaggcctcgcagaggatgaaaaaaggcagctgatccatgaagtcctcgctccgctcggccataacttaatggtgacccctaaagaggtcgatacatttatcgatgatatggcaaatgtgattgcaaacggtctgaacacagcgctccatgaaaatgtatcgcaagacaataaaggaatgtataaccactaagatcaaggcggctggcccggccgctttttttcatgacatttagcattgccggaacttgttctacttcctctatcttgtacatagtctatttactagacaagctctggagggatttacaatgagaaaaagaggcaggaatcgtcagtttgtgctggctgtaaatggaagaagcgcggttcagacagtattcttatttatcgtcagcctgctgctcgtttttattttatcaggcgtgctcacatcgctgcgtcctcagttaaggccgtcttcatcgttgtaccgggtggctcatcaactgaagggcgagacctttgggctcattttgggaatggaaaaccactactttgcatcagaattgccggaaccgaatcagcgctttcagctttcccccctcgtcctgaagctggcgaccagcattcatttgaaagatccgcgaagttttctcggacgggagcttccgggattctctcattttcactcggaaatcctcattgccgggcaagggacggattatacgaatatgccgtcagaatctccgccgccgactcaggtcttaaaagaggagagagaagcgaatcttgcagagcttcaagggaaacagaaaaagaaaacagacggggaaaaacctcctcaacaatcgacgggcggccgcaaagtcgtatttatctacaatacgcacaatacggaatcgtatcttccccttttaaaaggtcaggcagatccttt

SEQ ID NO: 71 - protein, 203 aa, Bacillus licheniformis
NEKKRQESSVCAGCKWKKRGSDSILIYRQPAARFYFIRRAHIAASSVKAVFIVVPGGSSTEGRDLWAHFGNGKPLLCIRIAGTESALSAFPPRPEAGDQHSFERSAKFSRTGASGILSFSLGNPHCRARDGLYEYAVRISAADSGLKRGERSESCRASRETEKENRRGKTSSTIDGRPQSRIYLQYAQYGIVSSPFKRSGRSF

SEQ ID NO: 72 - DNA, 1152 bp, Bacillus licheniformis
  CDS (107)..(985)
ttgtttttaattaaaaacgaaacaagctggtgcaaaattaattgaaaaaaagttttttggtaaaagtataaatttcatgaagagggttcagaatggtgctgaggtgatgagtaagaaagagaaagagaagaatcgtacttccaaaatcacaaagttgcaacaattttttcgtaaacgctgggtatttccggccatctatttgacaagtgccgtcgttgtattaaccgccgttctatggtatcaatcggcttctaacaacgatgtaaaagaccagcttgcagacgatggcaagaaatcagcctatgataaccgggatgatgcggtagaagtaggcaaaccagtcgaaaatgtcgcaatgccggttgctgattctgaaaatgtttccgtcgttaaaaagttttttgaaactgacgcaactaaagaagagaaagaagcagcacttgtaaactataataacacgtacagcatgagcaaaggtatcgacttggctgagaaagacggaaaaacatttgatgtttccgcatctctaagcggtacggtcatcaaagctgcaaaagaccctgtactgggctacgttgttgaagttgaacatgaagatggtttatcaactgtgtatcagtctctttctgaagtaagcgtcaaacaaggtgacaagattgaacaaaatcaagtcatcggaaaagcaggcaaaaacctttacaatgaagaaggcggaaaccatgtgcattttgaaatccgcaaagacggtgttgcgctaaacccgctgaacttcatggacaagccggtctccagcattgaaaaagcaatggaggaacaagcgtctgaagtgaaagaacctgctcagccttctgttgaagaaaagtcaaaaacagaagacaaagcgaaagatcaaacagatggaaaagacgacaaaaccaagcgggaagattcgtctgaagggtcagaaaatcaagacggaacccagtctgacgattcaagccagtcataaggcacgcttccctcagggcgcctatcaaatgcgataggcgccttttttgttacaatcaaaaaaaacccgtatcaaatcggcggagccagccgtttttaagtaagaggcctctttaaggagtggaaggcattaggaagtaagtagaacagcaaaccgcctagtaa

SEQ ID NO: 73 - protein, 293 aa, Bacillus licheniformis
MSKKEKEKNRTSKITKLQQFFRKRWVFPAIYLTSAVVVLTAVLWYQSASNNDVKDQLADDGKKSAYDNRDDAVEVGKPVENVAMPVADSENVSVVKKFFETDATKEEKEAALVNYNNTYSMSKGIDLAEKDGKTFDVSASLSGTVIKAAKDPVLGYVVEVEHEDGLSTVYQSLSEVSVKQGDKIEQNQVIGKAGKNLYNEEGGNHVHFEIRKDGVALNPLNFMDKPVSSIEKAMEEQASEVKEPAQPSVEEKSKTEDKAKDQTDGKDDKTKREDSSEGSENQDGTQSDDSSQS

SEQ ID NO: 74 - DNA, 1747 bp, Bacillus licheniformis
  CDS (501)..(1244)
gctttaatcgcgggtaacttgcacagtacaaccgacatcccgttctgggtgcagtttgcatgcgccatggccatgggactcggaacatctgtcggcggctggaaaatcatcaaaaccgtcggcggaaaaatcatgaagatccgtcccgtcaacggtgtctctgcagatttgacgggagccctcatcatctttggcgcgacgatcgtccatttgcctgtcagcacgacacacgtcatttcttcatccattttaggcgtgggcgcttcccaccgggtgaaaggcgtaaactggggcaccgcaaagcggatgctgatcacttgggtcattacccttcccatttcggcaaccatcggtgcatttgcctatttcatacttgatttattcttttaatcagcacactcccgtccgaatctaggacgggagttttcatgtttaaaagaaagccggcataacaatagaaataggaactgcactatttctcgggaagagggaaacaagttatgctgctattttatcaattccttgtttggcttattgttttggcgctggctctgtacgtagctgccgtgtggcgttttgaaaaacagctcgccgaaaaaacggtcgccatcagaaaaacgtggtaccttctttatgtcatcggcgccgtgatatattggacgcacgatccgcagtcaattttcacaaacccgcttcattacctgatcgttgccgtttttttcacgttgacagacgcttttattttcttaaatgcctactttaaaaagctcggcagctctgaactcgcgacagatacaagaatgcttctcgaagaaaacaacgacctcctccacacgtatcaaaacaggctgaaaacgtttcaatacctattgaaaaacgaaccgatccacatctattatggaaatatagaagcgtatgcagaaggcatcgaaaagctcatcaaacggtttgccgaaaaaatgaatatatccgctgcactttgcgaatataattcagaagaaagcaaggatcatttgcttgagcatatggaaaaccggttcgatgttcaagaaaagcttgaccgcaaagacgtttattatgaagaaaacggaaaaatggtcctcattcctttttccatccacgattttgactatgtcatgaagttaacctcagaagaccttgtcacagaatttgattatctcctgtttacttctttaacaagcatctatgatcttctgctaccaaacgaagaggaaggtgacgactgatggagcctgcttttcagcaagaccaggaaagcgtaaaaaagcgcctcgcctttaaaatgtttaaaaggcaatccaaaaccaatatcgcgaaatacgaagtcagcccctataccgaacggattttccggcaaaacgaacggctgatcggcgagtataaaagaaaaaaagcttaacgaggacgggaaaaaaattctcccgtccttattccgttttcccgtttcttacatacaataaaccaatcaactaaaccgctgaattaggtgatgctgtgaaaaaactgaaaaaacaagtcaaacacgtcgatttcgcaaaattcggcctgtcagactatacctctcttctcagaagaagaagcgaaaaaatcattaaaacgctgaacagaagaaaaaacaaaccgtgaagcttggactttcaccctccttctctgctgagaaggggggttattttcatgtctacaggagcatcataaaggatgcccctgtccgccttctcctacagat

SEQ ID NO: 75 - protein, 248 aa, Bacillus licheniformis
MLLFYQFLVWLIVLALALYVAAVWRFEKQLAEKTVAIRKTWYLLYVIGAVIYWTHDPQSIFTNPLHYLIVAVFFTLTDAFIFLNAYFKKLGSSELATDTRMLLEENNDLLHTYQNRLKTFQYLLKNEPIHIYYGNIEAYAEGIEKLIKRFAEKMNISAALCEYNSEESKDHLLEHMENRFDVQEKLDRKDVYYEENGKMVLIPFSIHDFDYVMKLTSEDLVTEFDYLLFTSLTSIYDLLLPNEEEGDD

SEQ ID NO: 76 - DNA, 2020 bp, Bacillus licheniformis
  CDS (501)..(1742)
gattcactcatacgccatgagtgaaattgagccattggaaacaactatcaagacgtatgaagttgagttagaggaattaaaaacgaagagaaaagaacttataaattggaggctaaaagatattatttcagaagagattttaaaagaggaaatggaagatttacgagaggaagaaaaattaataataactcgaattgaaaaattacagcacctcattaaactcagagataaaacctttttaaccaatatcatttcaacttcactacacgatctaaagaactttttcaatattatcgaagatgatgacaaaaaggaattacttcgttctctcattgaagagattcacgtaaatccaggaaaaactactaaggatagaacgatcaaagaagtgatttataagtttgatttaaaatatttgaaatcaattgaactaagagaaggggaacatcttttctcttttttgtgtttcatattataattacaaggaagggaggattattatgcacgaaataaaacgtgtcgcaatttactgtagagtttctaccgaagagcaggcaacggaaggatacagcatatctgcccaattacaaactttacgtcaatatactcagttatatggttgggagattgcagaggaatatgtagatgagggaataagtggaaagaacattagcggtcgccctgcaatgcaaaaacttatttcagatgttgaaaaggataaatttcaagctgttcttgtttggaagatctcacgcctatcacgaaatatgttagatactctcactctattagacaaattcgaagattatggagtaaagttcatctcttactctgaaaactttgatacaggcagtccaattggtcgtttagttgttcaactaatggcttccattgcagaaatggagcgtaatacgttatctgagaacgttaagctcggaatgaaacagagagcattagaaggttcatggaatggaggcgttgtatttggctacgatacaattgaaaaagagcttgtgatcaacaaaaaggaagctgagattgtacaacaaatctatcaactatatgccaatggtaaaggcttaaagtcaatcgcaaactacttaaataaagcaggttacagaactaaacggaattgttatttttcgataaacggtgtagctcaaatcttagacaatgttatctataacgggaagatcagttggttaaaagttgaaaattgggatacaaaacggaggagagggaaaaatccaaatcctatccttgtagaaggacagcatgaagccattatttccgatgaattatggagtatggtacaagcaaggcggaaaagtaaatcatttaaacaaaggcaatctaatgaaccatttttacttagcagtcttttacgttgccccgattgtggtcaaggtatggttcctgccattacaacaaataaacgaaaggatggaacaaagaagaaatatcgttattatgtttgctctaactttcataacaaaggttcatctgcatgtagagcaaattcaataaaagcatatgatgcagaatacgaagtaattaataagattgagaagatcctttccaaccaaaatcagttattctctaaacttcaatctataaatactacttcgattgaatctttaaaccaactcaatagtgaattgaaacaattagaaaatcgcctatcagaaatacaagagtacagaatcgttacttggaagcatttgagcaaaagaccttaccaatagcaatcttgcaagaacgattacagcatgtctctaaagaaaaagcagagttagaacaaaggcacaatgaatcactgggcaattaagctcgaacgatgcaaaagtaataaaaccagaactgattcaaaagctttagaaaaaattcctttagtctataaacatcatcaagagaaagcaaaacagttactcaacttttgcttataaattacagtaagcatcaatgggtcatcacgattgtcgatcaattgaactcgactttgactttcagaagtcatatt

SEQ ID NO: 77 - protein, 414 aa, Bacillus licheniformis
MHEIKRVAIYCRVSTEEQATEGYSISAQLQTLRQYTQLYGWEIAEEYVDEGISGKNISGRPAMQKLISDVEKDKFQAVLVWKISRLSRNMLDTLTLLDKFEDYGVKFISYSENFDTGSPIGRLVVQLMASIAEMERNTLSENVKLGMKQRALEGSWNGGVVFGYDTIEKELVINKKEAEIVQQIYQLYANGKGLKSIANYLNKAGYRTKRNCYFSINGVAQILDNVIYNGKISWLKVENWDTKRRRGKNPNPILVEGQHEAIISDELWSMVQARRKSKSFKQRQSNEPFLLSSLLRCPDCGQGMVPAITTNKRKDGTKKKYRYYVCSNFHNKGSSACRANSIKAYDAEYEVINKIEKILSNQNQLFSKLQSINTTSIESLNQLNSELKQLENRLSEIQEYRIVTWKHLSKRPYQ

SEQ ID NO: 78 - DNA, 1417 bp, Bacillus licheniformis
  CDS (510)..(1298)
tgcggacatccgcttgcttttctcccgcttttgaaaccgtttcttccggcgcaccccatcctgaatgaatcagggtaaattcggttttttctgcagaaagctctttcaattcaaatgtgacgatccatcccgacgtatcccagctgaaagcgagtcgatgcggcgcatcaagctcgatcactttgcacggggaggggccgaaaggagactgcagggtgaattcgcagccgatctccgggcggaaatcattaggcataaaccaggcggcgatgccttcactggtggcgacggcctcccacactttttctatcgatgcgtgaaaaacagcctgtttatgtatatcaggcactagttgattgctcataatagacctcctagaaaaaagtaaaaccaaatggtttcctttctattatatgaaaccttttagttttatgtcaatgttccgtcataattccctgggacaaggcatatcattgaacaaacgaacctgaatgtaaaggatgagggttatgagtcatagagcagatgagattcgaaaaagaatggccaggaaaagaaagcggaaaacaccggacaaacagcccttttcatcagacggcaaaaagcggccgctcaagccgcctgcatggacagccttttcggaagatgaaaaaggaggagacttccctccgcctgaaggaagttccctgctgataaacgggaagcacccgcttgtcaaggcggatgcgctcatcttgaaatgtcttctgtcggcatgccttgttcttgtgtccgccattgcctacaaaggccagtttgaacccgcaaaccaaatcaaaccggttatcagccaggtgtttactgaagagttccaatttgcggccctccagaattggtatgaatccaagttcggcgatcccctcgcattctttcagccgaaaggcgccaaaccgtccggccaggtcgaggtgaatcaggatctcgctgtacctgccgtaggaaaggttcaggagaaattctcagggcagggcattaaggtagaaacagaagacgaaacgatccgcagcatgaaggaaggctatgtcattgaagtggacaaaaatccggaaacaggcctgacggtggtcttgcagcatgcggacaacagctatacctactacggccagctgaaaaaagcggatgtcgctttatacgattatatagataaaggaacgaagctcggaacgattgagcaggataaaaatcaaaaaggcatctattactttgcgatcaaacaaggagaggaatttgttgatccgatacaggtgatcacatttgagtaaatggacggagctcttcaccaagcttcacattcatccgctgctgtggcttgtcatggcgatcggtatcatgacaggacatattaaaggcgcgtgttttgtttaatgcacccaggaag

SEQ ID NO: 79 - protein, 263 aa, Bacillus licheniformis
MSHRADEIRKRMARKRKRKTPDKQPFSSDGKKRPLKPPAWTAFSEDEKGGDFPPPEGSSLLINGKHPLVKADALILKCLLSACLVLVSAIAYKGQFEPANQIKPVISQVFTEEFQFAALQNWYESKFGDPLAFFQPKGAKPSGQVEVNQDLAVPAVGKVQEKFSGQGIKVETEDETIRSMKEGYVIEVDKNPETGLTVVLQHADNSYTYYGQLKKADVALYDYIDKGTKLGTIEQDKNQKGIYYFAIKQGEEFVDPIQVITFE

SEQ ID NO: 80 - DNA, 1468 bp, Bacillus licheniformis
  CDS (982)..(1428)
cggccatatcgcacaggtagcgggtgaccgcggatacaaagaaaagcttgaacggctgcctatttatcaggtcagcaaagcggatcaaagcatggtggtgctggacgtgatgaaggtgattgaagctgtacataaatcgtttcctgaccttgatgtccaaaccgtcggcggttctgaaaccatcgtggagatccaatatccgaaaagggatctgtcgcccgtgcttttcatcgccgtctggctgctcttgttcgtcggtgccggccttgccgtcatgaactttcatgaagatgtcagcatgagggaagtgcacatcctgctttacgaaatggtgacgggcaaggtgaaccgctatccataccttttgcaggttccgtacagcatcggtcttggcctcggcatgatcttgttttttaatcatttatttaaaaaacggtttaacgaggagcccagccccctggaggtcgagatgtttaaatatcagcttgatttggaccattatgtggccatgcacgaaaacaaagaaacgacaaaggatattcatgatcattagcgtgatatttatcatctttctcggactcgcaggaggggttgctgttggatccggctttgtcgcttttcttaccgtgcttggcattatcccgaggctgactcagctgacgaaaacaaaaggatttatccaggcgtatgaatgggctgtcattttaggcgcggttttcggaggatgggaatcgctgaacatgtcccgcttttttttatccaaatggctgcttgttccgatcggcctttttgcgggcgttttcattggaatgcttgcagcggcgctaacagaagtcttgaacgtgctgccgatactggcgaaacgcatcgggatgggagaccggattttgatacttttaatggccattgttttcggcaagattctcggatcgatgttccaatggctcatttttgttcatttgtcataaaaggaggattatgatgtcaagtttgaaagataattatcaatcgaaagttaaagcgtatcagccttcaccgccttatgtcctgaactgtatcaaggcatttctcgtcggtggtctgatttgtacgatcggccaggctttccagaatttttatatggctgtgttccattttgatgaaaaaacggccgggaacccgacggttgccacgctgatcctgatctccgctctgttaacaggccttggcgtctacgacagaatcggacagtttgccggcgctggttctgccgttccggttacagggtttgccaacagtatgacgagcgcagcgctggagcataaaagcgaaagctacgtcctcggcgtatggacaaacatgttcaagcttgcgggaaacgtcatcgtgttcggtgttgtggccgcttatattgtggggatgatccgctttgcctttgacaagctgttttaggaggaaaacatcatgaaattaacaggaaaacaaacat

SEQ ID NO: 81 - protein, 149 aa, Bacillus licheniformis
MSSLKDNYQSKVKAYQPSPPYVLNCIKAFLVGGLICTIGQAFQNFYMAVFHFDEKTAGNPTVATLILISALLTGLGVYDRIGQFAGAGSAVPVTGFANSMTSAALEHKSESYVLGVWTNMFKLAGNVIVFGVVAAYIVGMIRFAFDKLF

SEQ ID NO: 82 - DNA, 1453 bp, Bacillus licheniformis
  CDS (504)..(950)
tatcagcttgatttggaccattatgtggccatgcacgaaaacaaagaaacgacaaaggatattcatgatcattagcgtgatatttatcatctttctcggactcgcaggaggggttgctgttggatccggctttgtcgcttttcttaccgtgcttggcattatcccgaggctgactcagctgacgaaaacaaaaggatttatccaggcgtatgaatgggctgtcattttaggcgcggttttcggaggatgggaatcgctgaacatgtcccgcttttttttatccaaatggctgcttgttccgatcggcctttttgcgggcgttttcattggaatgcttgcagcggcgctaacagaagtcttgaacgtgctgccgatactggcgaaacgcatcgggatgggagaccggattttgatacttttaatggccattgttttcggcaagattctcggatcgatgttccaatggctcatttttgttcatttgtcataaaaggaggattatgatgtcaagtttgaaagataattatcaatcgaaagttaaagcgtatcagccttcaccgccttatgtcctgaactgtatcaaggcatttctcgtcggtggtctgatttgtacgatcggccaggctttccagaatttttatatggctgtgttccattttgatgaaaaaacggccgggaacccgacggttgccacgctgatcctgatctccgctctgttaacaggccttggcgtctacgacagaatcggacagtttgccggcgctggttctgccgttccggttacagggtttgccaacagtatgacgagcgcagcgctggagcataaaagcgaaagctacgtcctcggcgtatggacaaacatgttcaagcttgcgggaaacgtcatcgtgttcggtgttgtggccgcttatattgtggggatgatccgctttgcctttgacaagctgttttaggaggaaaacatcatgaaattaacaggaaaacaaacatgggaattcgagaacccgctgtttgttaactcaagcggaacagcggtcggtcccaaagaaaaagaaggtcctcttggacacttatttgacaaaagctatgatgaaatgcactgcaaccagaaaaactgggaaatggcagagcgcaagctgatggaggatgcggttcagtccgcgttatcaaaacaaaatcttaaaaaggaagacatcgatatctttttggctggcgatctgctcaaccaaaacgtgacagccaactatgtggcgcggcatttgaaaattccttttctctgcttatttggagcatgctcgacatcaatggaatcgatcgcgatcagttcggcgttgattgacgggggtttcgcaaagcgcgccctagcggcaaccagcagccataatgctacggcagaaaggcagttccgctacccgacggaatacggggggcaaaaaccgggaaccgcgacttc

SEQ ID NO: 83 - protein, 149 aa, Bacillus licheniformis; identical to SEQ ID NO: 81

SEQ ID NO: 84 - DNA, 2020 bp, Bacillus licheniformis
  CDS (501)..(1517)
gctcatttttgttcatttgtcataaaaggaggattatgatgtcaagtttgaaagataattatcaatcgaaagttaaagcgtatcagccttcaccgccttatgtcctgaactgtatcaaggcatttctcgtcggtggtctgatttgtacgatcggccaggctttccagaatttttatatggctgtgttccattttgatgaaaaaacggccgggaacccgacggttgccacgctgatcctgatctccgctctgttaacaggccttggcgtctacgacagaatcggacagtttgccggcgctggttctgccgttccggttacagggtttgccaacagtatgacgagcgcagcgctggagcataaaagcgaaagctacgtcctcggcgtatggacaaacatgttcaagcttgcgggaaacgtcatcgtgttcggtgttgtggccgcttatattgtggggatgatccgctttgcctttgacaagctgttttaggaggaaaacatcatgaaattaacaggaaaacaaacatgggaattcgagaacccgctgtttgttaactcaagcggaacagcggtcggtcccaaagaaaaagaaggtcctcttggacacttatttgacaaaagctatgatgaaatgcactgcaaccagaaaaactgggaaatggcagagcgcaagctgatggaggatgcggttcagtccgcgttatcaaaacaaaatcttaaaaaggaagacatcgatatctttttggctggcgatctgctcaaccaaaacgtgacagccaactatgtggcgcggcatttgaaaattccttttctctgcttatttggagcatgctcgacatcaatggaatcgatcgcgatcagttcggcgttgattgacgggggtttcgcaaagcgcgccctagcggcaaccagcagccataatgctacggcagaaaggcagttccgctacccgacggaatacggggggcaaaaaccgggaaccgcgacttcgacagtgaccggaagcggagcggtcgtcctcagccagcagcccggcggaattaaaattacaagcgcaactgtcggaagggttatcgacttggggattaccgattcgcaagatatggggtcggcgatggcacccgctgctgcggatacgatcaagcagcatttggaggatctgggacgcacccctgatgattacgatctgatcttaaccggcgacctttcaggcgtcggcagcccgattttgaaggatctgttaaaagaggaaggaatcaatgtcgggacaaaacataatgactgcgggctgatgatctatacgcctgaccagcaagtttttgcaggtggaagcggatgcgcttgttccgcggtcgtcacctttgcccatattttcaaagaaattgaagcgggaaggctgaacagagtgcttgttgtcgcgacaggcgcccttttaagcccgacgatcatccagcaaaaagaatcgataccatgcattgcccatggcgtcgtatttgaacgggccgaaagggggaacgcttaagatggagtatgtcattgcttttattgcaggcgggctgatttgcgtcatcggacagctcttgcttgatatcttcaaaatgacgccggctcatgtcatgtcaacttttgtcgtatctggagcgatccttgacggattcggcatttacgaccgttttatcgaatttgccggtgccggggctacagtcccgattgtcagcttcggccactctcttttgcacggcgcgatgcaccaggctgagaaacatggctttatcggaatcggcatggggatatttgaactgacatctgccggtatatctgccgctatcttgttcgcttttcttgttgccgtgatttttaaaccgaaaggataaaggaaaatgccagcaaaacgcaaggtcattttggtcacagacggcgatatatacgctgcaaaagcaatcgaatatgcagcaagaaaaacgggtggccgctgcatttcccaatcggcggggaatccgagcgttaaaacaggaccggagc

SEQ ID NO: 85 - protein, 339 aa, Bacillus licheniformis
MKLTGKQTWEFENPLFVNSSGTAVGPKEKEGPLGHLFDKSYDEMHCNQKNWEMAERKLMEDAVQSALSKQNLKKEDIDIFLAGDLLNQNVTANYVARHLKIPFLCLFGACSTSMESIAISSALIDGGFAKRALAATSSHNATAERQFRYPTEYGGQKPGTATSTVTGSGAVVLSQQPGGIKITSATVGRVIDLGITDSQDMGSAMAPAAADTIKQHLEDLGRTPDDYDLILTGDLSGVGSPILKDLLKEEGINVGTKHNDCGLMIYTPDQQVFAGGSGCACSAVVTFAHIFKEIEAGRLNRVLVVATGALLSPTIIQQKESIPCIAHGVVFERAERGNA

SEQ ID NO: 86 - DNA, 2473 bp, Bacillus licheniformis
  CDS (501)..(1970)
cgaatatgcagcaagaaaaacgggtggccgctgcatttcccaatcggcggggaatccgagcgttaaaacaggaccggagcttgtaaccatgatcctgcaaacccctcatgatcctgtattcgtcatgtttgatgattccggacttcaaggtgaaggcccgggagagacagctatgaaatatgtagcgatgcatcccgatatcgaggtgctcggagtcatcgccgtcgcttcaaaaactcattatgcagagtggacgagagtcgatgtatcaatcgatgcagaaggcgaactgacagagtacggcgtcgataaacacggggtcaaagagttcgatgtcaaacgaatgaatggtgatacagtctattgccttgaccagctggatgttccgatcattgtcggaatcggtgatatcggtaagatgaacagaaaagacgatgtggaaaaaggttcgccgattacaatgaaagcggtcgagctcattttagaaaggagcgggtatcatgagtgctcaaaagcaagagaagacgaacgtattccttgatccttctaagaatgaagcgtatttcaagaagcgggtcggcatgggagaaagctttgaccttggcgtacggaaggtctttattctcggacatgaagttcagctttattatgtcaacggattgtgcgacacacaatacatcattcacctgttaagagaactggtgcatctgaatgataaagaaaaagaatcgggcgaggtcgaagacatcgtcgaaaacaggcttttgaaccagcaggtttcaaaagcggaaacgcttgatgaagctgtcgaccaagtgttgtcaggactggttgccatcatcgtcgaagatgcgggctttgcttttatcatcgatgtcagaagctacccgggcagaacgccggaagaacctgatacagaaaaagtcgtacgcggtgcaagggacggactcgtcgagaacatcatcgtcaacacagccctgattagacgccggatcagagatgagcgcttgcgctacaaaatgcttcatatcggtgaacgctctaaaacagacatctgcctctgctatttggaagacgttgcagatcccgatcttgttgaagtattaaaaaaagaaattgaagatgtgaagatcgacgggctgccgatgtcggataaatcggtagaggaattcctggtcggccaaggctacaatccgtttccgcttgtcaggtttacggaaagggcagacgtagccgcaagccatattttagaggggcatgtcatcgtgatcgtcgatacgtcgccaagcgtcatcatcacaccgaccactttgtttcaccatgttcagcatgctgaggaatacagacagacgccggctgttgggacgtttttaaggtgggtgcggtttttcggtattttggcctccacctttttgctgccgctttggctgctgtttgtcattcatccgtcgctcttgcctgataatttatcgtttatcgggttgaataaagacacccatattccgattatcatgcagattttcctggcggatctcggcgtcgaatttttaagaatggccgccattcatacgccgacggcgctttcgactgcaatgggcctgatcgccgctgtattgatcggcgatatcgcgatcaatgtcggcttgttttctcccgaagtcattttatacgtttccctctcggcaatcggagcctacacgacaccaagctacgagctgagcctggcgaataaaatggtgaagctgtttatgctgatattggtggcgctttttaaagtggagggatttgtcatcggattaacgatcttaactatagtgatgacttcgatcaggtcattgcgaacgccttacttatggcctctcctcccgttcaatggaaaagcgttttggcatgttctcgtgcgcacgtccgttccagggggaaaagtcaggccgagcatcgttcatccgagaaaccgctccagacagccgtgaagccggcattcgaagaggcttttccccggggaaaagcctctttttcaataatcgaattccggtctttgagtaccgatgcctctgtattcattggcagagatcgcgactgcccggaggctgcagatgttgttctgtcttctgatcggatagacgacatacagcatttcgcggccgtacgggtcaatcgttgacgaatgaaggaaaacctcagttcctctccgccaaaatctcgtattcgccggagctgtaataatctgcccttcataaggctcataaattctctgttcataatgcgcagccggctgataaggggcgtatacatcttcaggtgcatagccgggagcgggggtgtagggataacgatttggatacatatgataacctctttcccacttcgttttttggttttcatctttaagattatattcaggtaaatgcctatttgtatgggcgaaaatctcagcttttcggctctttttttattgaatggacgttgtgta

SEQ ID NO: 87 - protein, 490 aa, Bacillus licheniformis
MSAQKQEKTNVFLDPSKNEAYFKKRVGMGESFDLGVRKVFILGHEVQLYYVNGLCDTQYIIHLLRELVHLNDKEKESGEVEDIVENRLLNQQVSKAETLDEAVDQVLSGLVAIIVEDAGFAFIIDVRSYPGRTPEEPDTEKVVRGARDGLVENIIVNTALIRRRIRDERLRYKMLHIGERSKTDICLCYLEDVADPDLVEVLKKEIEDVKIDGLPMSDKSVEEFLVGQGYNPFPLVRFTERADVAASHILEGHVIVIVDTSPSVIITPTTLFHHVQHAEEYRQTPAVGTFLRWVRFFGILASTFLLPLWLLFVIHPSLLPDNLSFIGLNKDTHIPIIMQIFLADLGVEFLRMAAIHTPTALSTAMGLIAAVLIGDIAINVGLFSPEVILYVSLSAIGAYTTPSYELSLANKMVKLFMLILVALFKVEGFVIGLTILTIVMTSIRSLRTPYLWPLLPFNGKAFWHVLVRTSVPGGKVRPSIVHPRNRSRQP

SEQ ID NO: 88 - DNA, 1567 bp, Bacillus licheniformis
  CDS (501)..(1064)
aaagattcaatcgtacatgccgattttaaagtggttgatatggaagcggaaatggaggcgacggttcctgtaaaccttacgggtgaagcagagggcatcaaacagggcggtgttcttcagcagccgctttacgagctgtctgtcacagcaaagccgaagaacattccgcagacgatcgaggttgatatttccagtctcgaagtcaatgatgttctaaccgtcggcgatattccgaccaaaggcgattattcatacaaccatgagcctgatgaagttgttgcatccattcttcctcctcaaaagcaggaagaaacagaagccgaatcagctgctcaagacgttgaggaaccagaaaaaggcactgaagaggaaaaagaagaataaatacgtaagacgtaatccgcccgcggttacgtcttttgtgctagaatgaggggaaattaggatgctccccctcagtatgctgaggcagggttttgcttaagggaggatatagaataatgcttgtgtttgcaggattgggcaatccgggtaaaacatatgaaaatacgagacacaatgtaggttttatgacgattgacgagctctcgaaagagtggaacattccgcttgataaaacaaagttcaacggacaatacggaatcgggtttgtttccggcaaaaaggttctacttgttaagccgcttacatatatgaatttatcgggagaatgtttgaggccgcttttggactattacgagatccctgttgacaatttgaaagtgatttacgatgatttggatcttccgaccggaagaatccgtctgaggacgaaaggaagcgcaggaggccataacggcatcaaatcgacgattcagcatctgggaacaagtgagtttaaccggatcagaatcggaataggccgtccggtaaacggcatgaaagtcgtcgattatgtgcttggcgcttttacagatgaagaagagccggcgataaaagaggccgtcagacaatcggccaaggcctgtgaagcttctttggaaaaaccttttttagaagtcatgaatgaatttaacgcaaaggtataaggcaaaagggaacggaacatactagtcttaaaaagactcggtatggaggttcctttatggctttacattattattgccggcattgcggcgttaaagtcggaagtcttgaccattcttatgtaaacagtgaacagttaggctttaaccacttaacaaatgatgaaagaaacgatatgatttcttatatggataatggggatttacacgtgaagacgatatgtgaagattgtcaagaagcgcttgagcgaaacccggattatcaccaatatcattcatttattcaatagatagctttggtgtagagactagaccaaagcatttttctatttgaggaagagaggaggggctcatttgaacaatattcaatcctatataacaaaaagcgatgattttaaatccatcgtcaacggcttgaacgaagggctgaaggaacagctgcttgcggggctctccggatctgcccggtcgttatttacagccgctcttacaaaagaaacgag

SEQ ID NO: 89 - protein, 188 aa, Bacillus licheniformis
MLVFAGLGNPGKTYENTRHNVGFMTIDELSKEWNIPLDKTKFNGQYGIGFVSGKKVLLVKPLTYMNLSGECLRPLLDYYEIPVDNLKVIYDDLDLPTGRIRLRTKGSAGGHNGIKSTIQHLGTSEFNRIRIGIGRPVNGMKVVDYVLGAFTDEEEPAIKEAVRQSAKACEASLEKPFLEVMNEFNAKV

SEQ ID NO: 90 - DNA, 2097 bp, Bacillus licheniformis
  CDS (501)..(1598)
taaggtgctgacgagctttacaggtgttaagcacaggatgcaatacgtcgcgacgatcaaaaacagactgttttacaatgacagcaaagcgacaaacattcttgcgacgaaaaaagcgctgtccgcctttcaaaagccggtcattttgctggcaggggggcttgaccgcggaaatgaatttgatgaactaaagccgcatatgtcttttgtaaaagcggtgatcactttcggcgagaccgcgccgaagtttgagaagctggccgaagaaatgggaatacaacaggttaaacgtgtcgataatgttgaacaagcagcaactgcggcgttcagcctgtcagacgaaggagatgtcattcttctgtccccggcctgcgcaagctgggatcagtacaaaacatttgaagaacgtggtgacatgtttgtaaacgccgtgcatatgcttaaataagggcttgtctcgtaaagatagccctaagaattagagcttggggtgttcggctttgcaaacaaaaaaaacgtcaccggattttttgctggttatcattacgctattgcttttaacaatcggactgattatggtatacagcgccagtgcagtatgggcgacttacaaatacgacgactcctttttctttgcgaaacggcagcttttgtttgccggcatcggggtcatcgccatgtttttcatcatgaacgtcgactactggacgtggaggacttatgcgaaaatactgatcattgtatgtttctttctgctcatcatcgtcctggttcccgggatcggcatggaacggaacgggtcgaggagctggatcggagtcggcgctttcagcattcagccgtccgagtttatgaaactcgcgatgatcgcatttttggccaagtttttatctgaaaagcaaaagaatattacgtcgtttagaaaaggctttgtgccggcgctgggcattgtcttttcagcttttctgatcatcatgatgcagcctgacctcggaacaggaaccgtgatggtcggcacatgcatcattatgatctttgtcgcgggggcgagaatttcgcacttcgtttttctcggcctgatcggactgagcggttttgtcggccttgtgctgtcggcgccgtaccggatcaaaaggatcacttcatacttgaacccttgggaggaccctttaggaagcggctttcaaatcattcagtctctttatgcggtggggcccggcgggctgttcggcctcggcctcggccagagcaggcaaaagtttttctatctgcctgagccgcagacagattttatttttgcgattttatcagaggagctcggctttatcggcggatcgctgattcttttgctcttcagcgttctattatggagaggcatcagaatcgcgctcggtgcgcccgatttatacggcagttttgtcgccgtcggcgtcatttcgatgatagcgattcaggttatgatcaatatcggagtcgtgactggtttgattcctgttacaggcattacgcttccgtttttaagctatggcggttcatcactgaccttgatgctcatggcggtcggcgtgctgctgaatgtcagcaggtattctagatactagattttggcgataaccctgttgcgagatagcagggttatcggcgtgtacataaggattaagggggagaacagatgcggattgttgttagcggaggcggaacgggcggccatatttaccccgcccttgcgtttattaaagaagtgaaacggcatcacgaagatgttgagtttttatatatcggaaccgaaaaaggcctggagaaaaatatcgtcgagcgggaagggatccctttcaaagcgattgaaattacgggttttaaaagaaaactttcatttgaaaacgtcaaaaccgtcatgcgctttttaaagggtgtaaaagaatgcaaagaagaattaaaacggttcaagccggatgccgtgatcggcacgggcggctacgtgtgcggccccgtcgtatacgccgcttcaaaactggggattccgacgattatccacgaacaaaacagccttcccggactcaccaataagtttttatccaaatatgttgataaggtagc

SEQ ID NO: 91 - protein, 366 aa, Bacillus licheniformis
LQTKKTSPDFLLVIITLLLLTIGLIMVYSASAVWATYKYDDSFFFAKRQLLFAGIGVIAMFFIMNVDYWTWRTYAKILIIVCFFLLIIVLVPGIGMERNGSRSWIGVGAFSIQPSEFMKLAMIAFLAKFLSEKQKNITSFRKGFVPALGIVFSAFLIIMMQPDLGTGTVMVGTCIIMIFVAGARISHFVFLGLIGLSGFVGLVLSAPYRIKRITSYLNPWEDPLGSGFQIIQSLYAVGPGGLFGLGLGQSRQKFFYLPEPQTDFIFAILSEELGFIGGSLILLLFSVLLWRGIRIALGAPDLYGSFVAVGVISMIAIQVMINIGVVTGLIPVTGITLPFLSYGGSSLTLMLMAVGVLLNVSRYSRY

SEQ ID NO: 92 - DNA, 1882 bp, Bacillus licheniformis
  CDS (501)..(1397)
ctgccgaaataatgcctccttaaaacatgcttgtctttttaggcaggcatgttttttgttatcggttcatacatcataacaaaagggggtttttttcatgaggctgagtgaactttcgggaaaagaaatcgttgatgttaagcgggccgaacggctcggcgtactggggcagacggaccttgagatcaatgagcaggacggtcagattaccgctcttatcatcccttctgttaaatggttcggactaggaagaaaacaggggaatgacattaaggtgccctggtcgcaaattcaaaaaatcggctcggatatgatcattttggatgttccggaaagcagcgtgacaaaagaggagtaagcaaggtggaaacccgcccgtcccatgggggcgggctttttgtttttctggatttcaattcaccgctatttcctttttgtcatatgatgaaattagcttatgaattagatccttgtcaaaaaagaaggtgaatgttagagccatgttaaccggattgacgattgcaatcatcggcggcgatgcaaggcagctcgagatcatccgcaagctgacggaacaggatgcaaaggtctttttaatcggttttgatcagcttgatcacgggtttaccggagctacaaaactaaagctgaacgaacttgattttggcacaatagacagcattattctgcctgtatcgggcacatcgatggaaggaacggttgcgactgttttttccaatgaaaaagtggtgttaaaacaggaacatttagaaaaaaccaagccgcactgcgcgatttattcagggatttcaaaccaatatttagacggcatggccaaaggggcgaaccgtcgtcttatcaagctctttgaaagagacgatattgcgatttacaactcgatacctacagtcgaaggtgccattatgatggccatacagcatacagactttacgattcacggctcgaatgtaatggttctcgggctggggcggacgggaatgagcatcagccggacgttctcggcgctcggcgcacgcgtaaaagtcggagctcgcgactccgcccacctcgccagaatcatggagatgggcctcactcctttccacacaaacgaacttgcagagcatgttgaaaatatcgacatatgcatcaataccattccaagcctgattctcgataaacatgtcctctcacgaatgacacccagaacattaattctcgatttagcaacccgtcccggaggcacagattttgattttgccgaaaagcaaggcattaaagcgctgcttgctccaggacttcccgggatcgtcgcgcctaaaacggcgggacagatcattgccaatgttttgtgcaaccttttgtctgaattaacaactgaccgaaaggggctgtcataatgtcgatcaaaggaaaaagaatcggatttggcctaacgggttcacattgtacgtatgatgccgtttttccgcagattgaagcgctgatcaacaaaggggctgaagtcagaccggtcgtgacgcatactgtcaagtcgacggatacacgctttggagaaggggaagaatgggtcagaagaatagaagagctgactggatttgaagtcattgattccattccgaaagctgagcctctcgggccgaaaacaccgctggactgcatggttgttgcgccattgacgggaaattcgatgagcaagcttgcaaacgcccagacggacagtccggttctcatggcggccaaagcgacgatgagaaactcccgtcccgtcgtcctcggcatttcaacgaatgacgcgctcggcttgaacggcgtcaacttgatgaggctgatggcggcaaaaaatgtttactttattccgttcggccaggatgacccttac

SEQ ID NO: 93 - protein, 299 aa, Bacillus licheniformis
MLTGLTIAIIGGDARQLEIIRKLTEQDAKVFLIGFDQLDHGFTGATKLKLNELDFGTIDSIILPVSGTSMEGTVATVFSNEKVVLKQEHLEKTKPHCAIYSGISNQYLDGMAKGANRRLIKLFERDDIAIYNSIPTVEGAIMMAIQHTDFTIHGSNVMVLGLGRTGMSISRTFSALGARVKVGARDSAHLARIMEMGLTPFHTNELAEHVENIDICINTIPSLILDKHVLSRMTPRTLILDLATRPGGTDFDFAEKQGIKALLAPGLPGIVAPKTAGQIIANVLCNLLSELTTDRKGLS

SEQ ID NO: 94 - DNA, 1588 bp, Bacillus licheniformis
  CDS (501)..(1088)
atacctacagtcgaaggtgccattatgatggccatacagcatacagactttacgattcacggctcgaatgtaatggttctcgggctggggcggacgggaatgagcatcagccggacgttctcggcgctcggcgcacgcgtaaaagtcggagctcgcgactccgcccacctcgccagaatcatggagatgggcctcactcctttccacacaaacgaacttgcagagcatgttgaaaatatcgacatatgcatcaataccattccaagcctgattctcgataaacatgtcctctcacgaatgacacccagaacattaattctcgatttagcaacccgtcccggaggcacagattttgattttgccgaaaagcaaggcattaaagcgctgcttgctccaggacttcccgggatcgtcgcgcctaaaacggcgggacagatcattgccaatgttttgtgcaaccttttgtctgaattaacaactgaccgaaaggggctgtcataatgtcgatcaaaggaaaaagaatcggatttggcctaacgggttcacattgtacgtatgatgccgtttttccgcagattgaagcgctgatcaacaaaggggctgaagtcagaccggtcgtgacgcatactgtcaagtcgacggatacacgctttggagaaggggaagaatgggtcagaagaatagaagagctgactggatttgaagtcattgattccattccgaaagctgagcctctcgggccgaaaacaccgctggactgcatggttgttgcgccattgacgggaaattcgatgagcaagcttgcaaacgcccagacggacagtccggttctcatggcggccaaagcgacgatgagaaactcccgtcccgtcgtcctcggcatttcaacgaatgacgcgctcggcttgaacggcgtcaacttgatgaggctgatggcggcaaaaaatgtttactttattccgttcggccaggatgacccttacaaaaagccgaattcgctcgtcgccaaaatggatcttttagtgccggcggtcgaagaagcgctctcccataaacaaatacagcctatcctggtccataatgatcaataaatcttttgaaaataaagatgtaacaaaaaatatcaatcaccacggcacacatctatgttaaaataaaatgtaaaatgcatagtcaaccaatcgtttacgacgattaaggtggaaggagttttacaattgggcagaggattacatgtagcagtagttggtgcgacaggcgctgtaggacagcaaatgttaaaaacactagaagacaggaattttgaactggataaactgactttattatcctcaaaacgttcagcaggtacgaaactgactttcaaaggcgaagagtacacagtagaagaagctcgtcctgagagctttgaaggcgtcaacatcgcgcttttcagcgccgggggaagcgtttcgcaggcgcttgctcacgaggctgtcaaacgcggggcgatcgtcattgataatacgagcgcgttccggatggaccaaaacactccgctcgtcgtacctgaggtcaatgaggaagatttgcacaagcacaacgggat

SEQ ID NO: 95 - protein, 196 aa, Bacillus licheniformis
MSIKGKRIGFGLTGSHCTYDAVFPQIEALINKGAEVRPVVTHTVKSTDTRFGEGEEWVRRIEELTGFEVIDSIPKAEPLGPKTPLDCMVVAPLTGNSMSKLANAQTDSPVLMAAKATMRNSRPVVLGISTNDALGLNGVNLMRLMAAKNVYFIPFGQDDPYKKPNSLVAKMDLLVPAVEEALSHKQIQPILVHNDQ

SEQ ID NO: 96 - DNA, 2167 bp, Bacillus licheniformis
  CDS (501)..(1871)
gaaacagctgacccctgaatcctaccgggaattctcccgcaaagctgaccgcttggaaaaaggaatttctgaagctgcagagaaaaatggcattccgtgtacattcaacagggcggggtctatgatcggctttttcttcacaaatggaccggtcatcaattatgatacagcgaaacagtctgacctcggactgtttgccgaatattataaaggaatggccgatgaaggcgtgtttctgccgccttcacagtttgaagggctgttcttgtcaaccgctcatacggatgacgacattgagcatacgattaaagctgctgaacgcgtattcgaaagaatcagccgctccagataaagaaaagggctgccggacattgccggcggctcttttttgcatggtgccgaaaacggctgctgatttttctgttcatattctgcctgcttttcacatacatctttactgacatctaattttaaaaattaggtgaagggaggatatcagtttgccgcaaaacaatcgtttgcaattttctgtagaagagtcaatctgttttcaaaaaggacaggaagtatccgaattattatcgatttcattggatcctgacattaccgttcaggaagtaaatgattatgtatccatacgagggtcattagagctgacaggcgaatacaacatagatcaaacccgggagtatgcagagctgcctgcgacaagccgatttgtagaagatgtaaagctgaaaggggacggcagcgcagagctgacgcattgtttcccagtggatatcaccatcccgaaagacaaagtcaatcatttaaacgacgtatttgtttttattgacgctttcgattatcagctgacagatgcgaggatgctgacgattcaggctgatttggcgattgaaggcctcttgaatgtgagcggtgaagcgggtgaagaagaaccgcgcactatgcctgcggccgtccatccggaagaggagctcgaacctgcctacagatcaccttcaaacgacgaagatcagggtgaagagaaagaatatttgatccagcttgacagaccttacgaagagcaggacgaagaacaggcggaagaacatgataccggtgaggaaacggttccgatttaccagtcgtttctcggaaacgacacagaggaagctaaaccgttttttacagcgtctttgtcggcggcagagcgtacgaagcgcgaaatagaaaatcaaaaagaagcctctcttgaacagccggaagaagaatataagctgaaaagagagaaagtggaagaggaaccggaagaatatgagctgaaaagagagaaagtggaagaggaaccggaagaatatgagctgaaaagagaagaagcggaagaagagccggagctgtcgcacagctcttatcaacctcacgaggaactgaaagagaacccgttctacagtgttcctcctcttctgaaggaagaccagaatgacagggagcctgaggcttttgaggttgaggtgacacaggaagcagaagcgattgatgaagaagaggaagccgggcatacgattgaaatcccggaatattcgtttcatgagcagacggagcccgaagaagaaagagatgaaatgcaggcagcggatgaacaggaagtgtcagcaaaggaaaacgacaacgcactctatttgacaaagctgtttacaaagcagggagaggaggagtttactcgaatgaggatgtgcatcgttcagcaaaatgatacgattgatcttctgtgcgagcgctatgatattaacgtccagcagctcatccggatgaattccctttcccttgacgaggaattaaaagagggacagatcctttatataccggattatcaaaacagccatgcctaatgcattgataaaaatgtggtgaagccgatggaaggcatccagtctgttttaaatgagtacggtcttacgcctgaatatatggagtccgtcagttcaaaggtgtggaaagtgtatacggatcacggtgtatttgctctgaaaaaattggcggcttcaagaaacacccgcttcacggaacagatgatcatgctggaggaaaaaggctacaggcagttcgttcctgtctatcgaaaccgcacaggcgaatttttaacgcaagccggagaagatgtctgctatctcatgccctggct

SEQ ID NO: 97 - protein, 457 aa, Bacillus licheniformis
LPQNNRLQFSVEESICFQKGQEVSELLSISLDPDITVQEVNDYVSIRGSLELTGEYNIDQTREYAELPATSRFVEDVKLKGDGSAELTHCFPVDITIPKDKVNHLNDVFVFIDAFDYQLTDARMLTIQADLAIEGLLNVSGEAGEEEPRTMPAAVHPEEELEPAYRSPSNDEDQGEEKEYLIQLDRPYEEQDEEQAEEHDTGEETVPIYQSFLGNDTEEAKPFFTASLSAAERTKREIENQKEASLEQPEEEYKLKREKVEEEPEEYELKREKVEEEPEEYELKREEAEEEPELSHSSYQPHEELKENPFYSVPPLLKEDQNDREPEAFEVEVTQEAEAIDEEEEAGHTIEIPEYSFHEQTEPEEERDEMQAADEQEVSAKENDNALYLTKLFTKQGEEEFTRMRMCIVQQNDTIDLLCERYDINVQQLIRMNSLSLDEELKEGQILYIPDYQNSHA

SEQ ID NO: 98 - DNA, 1955 bp, Bacillus licheniformis
  CDS (501)..(1463)
aagaacgatcaaagggatttgttgaatggtgtgaaaataagggtagaacctattattgggtcaaagcttattattacgaaagataactatattatgttcagtaacagaatcatgaagacaaaaaaggcgaatttcatttccttcaaatcaaaaagactttggtgaagatcccgctgtgaaacaggggagagccgagcagcgcctgcagcacatcttcagacagattggctccattccccgaaggacctcatcaatcaccactttctcccgatttgccatgtcaacctgttaagcatttaccaaacaggatgaaaaaattggtttgtccgcacagcttacctgaatacaataaaaaataaagtatttctcgggaaagcgcaggtttcaacaagacctgccccgttcttgtcaaaaagcattggattgtgcagtcatgtgggcgtctgtcacggcataagcgcgccatgaataggatataaagagagaatggtgaggtgagtgtgttggaaagggctgttacttataaaaacaacggacaaatcaatatcatattgaacggtcaaaagcaggttttggccaattcagaggctgaagccgaatatcaggccgcactgcaaaaaaatgaagccaaacacagcattctgaaagaaattgaaagggaaatgaacacgctggtcggaatggaggaaatgaagcgcaatatcaaggaaatctacgcctggattttcgttaataaaaagcgcgaagaacaaggccttaaggccggaaaacaggcgcttcacatgatgttcaaaggaaatccgggaaccggaaaaacgaccgtcgccaggctgatcggcaggcttttttacgaaatgaatgttctctcaaaaggccatctgatcgaggcggagcgcgccgatctcgtcggtgagtacatcggccatacggcgcaaaaaacgagggatttaatcaaaaaagcgatgggcggaatcctgttcatcgatgaagcctattcccttgccagaggcggagagaaagacttcggcaaggaggcaatcgatacattggtcaaacatatggaggataagcgcaacgaattcattttaatcctcgccggatattcgcgggaaatggatcattttctttcattaaacccgggccttcagtcaaggtttccgatcagcatcgattttcccgattactcagtcagccagctgatggacattgcaaaacggatgatggcggaaagggaatatcagttcagccctgaggctgaatggaagctgaaagaccatctgatggccgtcaaaagtacggtcagccccgcgaagttcagcaatggccgtttcgtccgcaacctgatcgaaaaatccatccggtcgcaggcgatgagactgctgatgggagactgctacttaaagaatgacttgataaccatcaaaagccaggatctcgacttgaaggaagacgcgccgcacgtataatggcgcgttctttttttattttcgaggatttctggcaaccgctcccttcgtttgttatgatagtactgcttattgactaacgttaagaaaggaacatgatcacttgaacgaacaggaagtcatgaaagagaaagccatattagtcggatgccagcttccgcacgtgtctgatgagcgtttttcatactcgatggaagagctcgccgcgctgacgaaaacggccgacggaacggttgtttccacggtcacgcagaagcggaaccgtgtggatgctgctacatatatcggaaaaggaaaagtagatgaattggcggtgctctgtgaagagctgtcgcccgatgttttaatttttaatgatgaattgtcgccgagtcagctgaaagcgcttgtcacaacgcttgacgtgaaaatcatcgaccggacgcagttgatccttgatattttcgccaaacgcgcgaggacaagggaaggaaagctgcaaattgagct

SEQ ID NO: 99 - protein, 321 aa, Bacillus licheniformis
VLERAVTYKNNGQINIILNGQKQVLANSEAEAEYQAALQKNEAKHSILKEIEREMNTLVGMEEMKRNIKEIYAWIFVNKKREEQGLKAGKQALHMMFKGNPGTGKTTVARLIGRLFYEMNVLSKGHLIEAERADLVGEYIGHTAQKTRDLIKKAMGGILFIDEAYSLARGGEKDFGKEAIDTLVKHMEDKRNEFILILAGYSREMDHFLSLNPGLQSRFPISIDFPDYSVSQLMDIAKRMMAEREYQFSPEAEWKLKDHLMAVKSTVSPAKFSNGRFVRNLIEKSIRSQAMRLLMGDCYLKNDLITIKSQDLDLKEDAPHV

SEQ ID NO: 100 - DNA, 2082 bp, Bacillus licheniformis
  CDS (501)..(1607)
gactgccaccgctttctcggcgacatggacaatgagctgagatctctgttccagtcatttgaattttctaaaacgcctcgtgccgaaacatgctcaagaatcggctataactttcagcggaggcgggaatacaaggccgctatctactggtatgagctggccacaacattggtgcctgattcaaataaatggagcttcacctatccggcatactatacttggtaccctcatttgcaaatgtgtgtgtgctattacaatttaggagactttgaaaagtcgtatcatcataatgaagaggcgaggaaataccgtcccgaagacaaatccgtccttcataacaaacagctgctggaagggaaattaggcattaacaattagcattgtaaagacttactgaacaagtaggtcttttttttatgaataaaatcaagccgtgccaatttagcggcaggcatcataacttattttggaactttttgaatttagaggaggaacaaaggatgatcccgttagtcaatttaaaacgtcaatttcaaacagtaaaacaggatattttaaaagagtttgaacatgtgctggacagcggccaatatatattggggccaaaggttgaagaattagagaaaagaatagctgaaaagcttggtgtaaaagaagcggtcgcggtcgccaacggaacggatgcattggtgctgacgcttgaagctttcggcatcggcaaaggggatgaagtgattacgaccccgttcacttttttcgccaccgccgaagccgtctcaagggtgggggctgaacctgtgtttgctgatgtcgatcctgaaacatacaatcttgatccgaaaaaaatagaagaaaagatcacccctgctactaaagcgatcattcccgtccatatcttcggacagccggctgatatggacgagatcatggagcttgccaaaaaacacggactgcttgtgattgaggatgcctgccaagcgttcggcgcatcgtataaagagcggcctgtcggcagcatcggggatgccgcctgtttttcatttttccctacaaaaaacttgggaacattgggagacgggggaatggtgacgatttcagacccggatgcagcccggcaattaagaacactcagaacccatggcactagcaaaaaatacttccatgacaaaatcggtttcaacagccgtcttgatgaattacacgccgcagctttactcattcttcttgagaaaatcgacggctggaatgaacaaagaagaagagtggccagccgctacagagaaggtttgaaaacggcggagcacctcacactgccggcagagaaagaggaccgcacacatatctatcatctctattgtatcggcgcgaaaaaccgcgactacatcatacaatcgctgaaagagcaggacattcattcaggtgtgtattatccttgctgccttcatctgcaatcggtctattcttcactgcagtacaaaaaaggcgattttcctatagccgagtccttgtccgaaacccttttcgccattccgatggatccttttctagccgccgaggaacaagatcagattatttctgcgctgctgaaaaaaggaggaggggaaaagtgacggttcattttggtttaatcggctgcggctatatgtcaagaaaacatcttcaagcactggccgagtgcgatgatgcaaagttgtcggccgtcagtgatttgcaggaagaaagaatgaaggaagcggaagaatactatgcttccctcgccggtgaggaaagccgaatgacccgctatccgcagtatcaagcgctgctttcagatcctaaaattgaagcggtcattattgcggcggtttcgggactgcacgccgaaatggccaaacatgcgctgctggcaggcaagcacgtcatcgtcgaaaaaccgatgaccttgtcattacgggatgccgatgagcttatagaactggcggagcagaacgggctgaagctcatggtctgccaccagatgcgccaccggccgatcatgaaaaaactgaaggaaacgattgaggaaggaaagctgggaaagatctacttgggcacggtatcgct

SEQ ID NO: 101 - protein, 369 aa, Bacillus licheniformis
MIPLVNLKRQFQTVKQDILKEFEHVLDSGQYILGPKVEELEKRIAEKLGVKEAVAVANGTDALVLTLEAFGIGKGDEVITTPFTFFATAEAVSRVGAEPVFADVDPETYNLDPKKIEEKITPATKAIIPVHIFGQPADMDEIMELAKKHGLLVIEDACQAFGASYKERPVGSIGDAACFSFFPTKNLGTLGDGGMVTISDPDAARQLRTLRTHGTSKKYFHDKIGFNSRLDELHAAALLILLEKIDGWNEQRRRVASRYREGLKTAEHLTLPAEKEDRTHIYHLYCIGAKNRDYIIQSLKEQDIHSGVYYPCCLHLQSVYSSLQYKKGDFPIAESLSETLFAIPMDPFLAAEEQDQIISALLKKGGGEK

SEQ ID NO: 102 - DNA, 1975 bp, Bacillus licheniformis
  CDS (501)..(1472)
ctctcccggaataaaaggaacccgccacatccttaaggcggttgaatctttaaaagaaaaatacgattttcattttcacctagtacaaggagtttctcatgaacaggcaaagaaaatctaccaaaaggctgatttgatcattgatcagcttcatatcggcagctacggattatttgccgtcgaatcgatggcaatggggaaacccgttatctgctggatcagtgattttatgaaggatcactatccttccgaactgcctcttataagagcaaatcccgccaacattacagaggtgattgaaaatgtgcttaaaaaccgggatatgctgccggaaatcggccagaaaggaagaaagtatgcagaagttcatcatgatatggtgaaaaacagcaaaaaaacattggctgtttatcagtcgctactttcggaatgaagttgaacaactttcccgtcgcgggatttgtatgtaaaaaaaaacgaaacaagcaggtgaacaattgatgagcgatatgacagagttatccggccagcatattttcataactggcggagcaggctttatcggatcctctttaataggaaagctgatagagcgcaacagcgtcaccgtatatgacaatttttcaagagactccctccggtataagccttaccgggaccatcctcacttgaaagtgctgcagggagacattttggatttgaacgcgcttaaaaaggcgatccagggggccagccacattgtccacgccgccggcatcgctgggattgacacggtcattcaaaacccggttaaaacgatgcaggtcaacatgatcggttcagccaatctgcttgaagcggctgccggtttaaccgaatgcaaaagggttgtctgtttcagtacaagcgaagtgttcggccaaatcgctttcagagcgcgcgagaccagtcatactgttttaggagcggtgggagaagcccgctggacatatgctgtcagcaaactcgccgaggagcatatggcatatgcctattttaaagaacttgggcttccgaccgtcaccgtccgcccttttaatgtttatggaccggaacaagtcggcgaaggcgccatcaaaacgatggttcacagagctctgttagatgagccgatctatattcacggcgatggaacgcaaatccgggcctggtgttacgtagatgacatgatcgacggaattttgcgttgtttgacgatgaaggaagccatcggagagtctttcaacatcggcaatgaacgcactgtgatcaccgtatacggattggcaagcacgattatcagagttctcggatcaaaatcacaaatcttctttggggagaaaaaagaagccgatattgaactgcgcatccctcaggtcaataaagcaaaagagatgctcggtttcagcgctaaagttgatctggaagaaggcatcagaagaacagctgaaagcattaaaaaaaatttggatcaataagaaaggaggcgctattgttgaaacaatggaaaagcgaaggaaaaggtgaattcactctttcccagcttgggggctgtggcgaaaatgtcgttatcgaagacggggtccgcatttttcatccggaaaacatctatatcggagataacgtttatatcggccatgacacgattttaaaaggctattataagcatgacctgatcatcggttcaaacagctggatcgggcagcaatgttttatacacggtgccggcggggttacaatcggagaatttgcaggaattggtccgaacgtccggatacatgccgcttaccataccgatcctgataaacccgacagtaccattttgttttcgccgcttacattcgctcctattcatattgaagaaaactgcaacatcgggatcggtgcgtctatcctagcaggcgttacgataggcgcccactccaaaatcggagcaaatgccgtcgtcaatcgcaatattcccccgtacagcatagca

SEQ ID NO: 103 - protein, 324 aa, Bacillus licheniformis
MSDMTELSGQHIFITGGAGFIGSSLIGKLIERNSVTVYDNFSRDSLRYKPYRDHPHLKVLQGDILDLNALKKAIQGASHIVHAAGIAGIDTVIQNPVKTMQVNMIGSANLLEAAAGLTECKRVVCFSTSEVFGQIAFRARETSHTVLGAVGEARWTYAVSKLAEEHMAYAYFKELGLPTVTVRPFNVYGPEQVGEGAIKTMVHRALLDEPIYIHGDGTQIRAWCYVDDMIDGILRCLTMKEAIGESFNIGNERTVITVYGLASTIIRVLGSKSQIFFGEKKEADIELRIPQVNKAKEMLGFSAKVDLEEGIRRTAESIKKNLDQ

SEQ ID NO: 104 - DNA, 1213 bp, Bacillus licheniformis
  CDS (501)..(710)
acaaactgcgcgaacgccataacgcgcttgcgatctttacaggggaaagcctcggccaggtggcaagccagacgcttgaaagcatgtatgccatcaacgcggtcacgagcacgccggttttgcgccctttaatcggcatggataagacggaaatcatcgaaaaagcgaaggaaatcgatacgtacgatatcagcatacgtccgtacgaagactgctgcacgatctttacgccttctgcgccgaaaacgcgtccgaaaaaagagaaaatcgaacactttgaaagctacacagatttcgaaccgcttatcaacgaagctgtggaaaacacggaaacgattgttttgagcagcaaagcggaaacgaaagatcaatttgcggattttttctaaaggaatattcaatcaaacatctttgtctgtttttgcatacaattaccaaacattctttgtatgaagtcatgtgtttttacacaatctatactcacaaggaggtgagaacacatggctcaaaacaacagacaaagcagttctaaccaactattggttcctggtgctgctcaagctatcgaccaaatgaaattcgaaatcgcttctgaatttggcgttaaccttggagcagaaactacttctcgtgcaaacggttcagttggaggagaaatcactaagcgtttagtttctttcgctcaacagcaaatgggtggaacacaacaataattaaaattaaaaagcaatggataatgggtggggtttaatccccactcttttttatgttctgcaaaataggcatttcggaatacaattgtatgaaaggattatgtataataaaaagatggcacaagacaaggagatggaagggttgagaagagaagatttgattgcgccggagaagtataatgcggttgatgaaattgaaaaatttaaatcttcccgcgataagaccgcattgatctgggaagatgaatcagggcgtcaagtgtcatggtcctatgaaaaattgattgaaaaggcttacaaaatcggcagcatattgacccgttctggactgaaaaaaggtgacaagcttatcgtgatgatgccgcggataccggaaacgtatgccgtgtacatggccattttaaaagctggaatggtggtcatcccatgttccgaaatgcttcgggcgaaagacttggattacaggatcaagcatgcaggcgtcaaaggagccgtcgtat

SEQ ID NO: 105 - protein, 70 aa, Bacillus licheniformis
MAQNNRQSSSNQLLVPGAAQAIDQMKFEIASEFGVNLGAETTSRANGSVGGEITKRLVSFAQQQMGGTQQ

SEQ ID NO: 106 - DNA, 1196 bp, Bacillus licheniformis
  CDS (501)..(695)
cattgtacgagacttaaaatcggtttatgacttcgaaacgatccgtccgatcttaacaacgatttttaatacgattacagaccgctccgatgatgtagtgagtccgctgcgcttttatgaagggtatgcgcgggtccttgatcatgtgtaccagatcaaagactatacgctcaataaatcggcgcttgaaaaaatcgtcattgagcagactggacagctccgcgatttttataaagatctggccgatcccgaatggaacaaagcgagagacatcaccgcagtcactgtgctgtccgtcatcgcttcgcacattcaggcgaccgcacattccatgattgacagcgtcttcttaaaatatgaaatgaaataatcgccgaccggcgcgcctggcttgccaattgccaggcgtttttttgcccttcaacaattgccagcataaaaagcctcagtccaaatcaaactaaacaagcagtaccaattgaaaaaggagttgagaatgcatggcaagaacgaataagctcctcgttcccggggcagagcaggttttagaccagttcaaatacgaaatcgcccaagagttcggcgtccagctcggctcggactcggtcgctcgctcaaacggatctgtaggcggggaaatgacaaaacgacttgtacagcaggcacaagctcaattgaatgggcataatgacaaataaataccctatggattattcgccgggcccgctcggcggatattcttgtttattcgtttggtcagaaggctttttctccttttggtaaggaagtgatttagagctctcttgatttgaaccggaaccgctttttggcgttccttcctccgtctgctgaccgtctttgtcattatggttatgttcctgagggtttttggtattaggggaatttgactccttttctttttccatttcttgatcaggttgagactgatcttcatctgaaggtttttcgccgtccggatgatcttccgtatctgcttctttatcatccgtatgctgttccggctgatcttcttctttcacagctttctccttttctcctgtgttttcttcctgattttgatcatcttttttattttcattgtcatcatctttgtttttgtcttctaattcatctttgtgggaacggatataacggcctgttgagatgccttctttttgggcttttgcacgcgtatc

SEQ ID NO: 107 - protein, 65 aa, Bacillus licheniformis
MARTNKLLVPGAEQVLDQFKYEIAQEFGVQLGSDSVARSNGSVGGEMTKRLVQQAQAQLNGHNDK

SEQ ID NO: 108 - DNA, 2279 bp, Bacillus licheniformis
  CDS (501)..(1463)
acacgcagccaaaatgaaatggcctatcatatacattaatgaccattttggaatttggcaagcggatattgctgccattatcaagaaatgcaaaaacggcaggagcgaatatatcatcgaccggcttgcaccgaatgacagcgattattttttaatcaaaccaaagcactcagccttttacggcactgctcttgaaacattgctgcatgaacttcatgtcgatcatttgatcatcactgggatcgcaggcaatatctgcgtattatttacggcaaacgatgcttatatgcgggagtacgagattacgattccgcgcgattgcatcgcctcaaacaatgaaaaagacaacaaatacgccttgacgatgatggaaaatgttctgttcgccaatatcacgacggctaaggcgattacctccgaaacttagagcatgaaacacttcctttcatcatatagtggtagcaatgagaaaggaggcgtttcccattcagatttatgtcgtgaaaagaggcgataccctttaccaaatcgcgaatcgttaccgaacaacagttaatgaaattgtcgcgacgaatgaaattccgaacccgaatcggcttgttgtcggacaaaccatcgtgatcccgatcgccggcgagttttatgaggtcagacagggagatacattagcatcaatcggagcacgctttaatatttctccggctgaactggcgaggatcaaccgcattcaggttagcgccgttttaccggtcggactgctgctttacatcccccctcggccaagacggaacattgaaacaaacgcctatatcgaacctcggggagaaagcgtaagccccgctttgcagcaggcggcaagagaggcttcgccatacttgacctatctgggcgctttcagcttccaggcgaagcgggacggcacactcgaagaaccgccgctgaacaacttaaaagaaattgccgacagacatcggactacgatgatgatgattgtcaccaatctcgaaaatgaagctttcagcgacgaactcggcaggatcattctgacggaccagaatgtaaaaaacagattgctcgataacatcgttgcagcggccagaagatacggttttaaagacatccattttgacttcgaatacttaaggcccgaagatagagaagcctataatcagtttttacgggatgcccgggcccgcttcaggcaggaaggctggctcatctcaaccgcgcttgctccgaaaacgagagcggatcagcccggacaatggtatgaagcccatgattaccgggcccacggcgaaattgtcgatttcgtcgtgctgatgacatatgagtggggctacagcggagggcccccgatggcggtatcgccgatcgggcccgtccgggacgtgatcgaatacgcactcacggaaatgcccgccagcaaaatcgtcatgggacagaaactgtacggctatgactgacgctcccctatatgcacagcgggacccgttggccaagaccaatccggccccaacggggggattgagatcgcgagcgagaacaatgcggcgatacagtacgatgaaacagctcaggctccaaacttccgctatacggacaatgccggcaaacagcatgaagtatggtttgaagacgcccgctcgattcaggcaaagtttgatctgattagggaattgaatttaaggggaatcagctattggaagctcggcctgtccttcccgcaaaactggctcttgatagccgatcaatttaatgttgttaaagagacgttcccaagttaaaggaacgttttttttcatggcagcggatgatgatgtgatacaatatgtatggttcacaaatgaatttctttagtaggaggacacctatgaatacagcccctttcattgctgtcgaaggccccatcggcgcgggaaaaacaaccttggccagcatgctctccgaaaagctctcactctctttggtcaaagaaatcgtcgaagaaaacccttttcttgataaattttatgatgaaaaagatgaatggagctttcagcttgagatgtttttcctctgcaatcgctataagcagcttgaagataccgagaaaaagtatttgcatcatcacatgcccgttgtttcggactatcatatttataaaaacctcatttttgccgaacggacgctggaaggcaaaaaacttgagaaatacagaaaaatttatcagctgcttacagaagatctgccgaaaccaaacgtcatcatttacataagagcgagtcttccaactttat

SEQ ID NO: 109 - protein, 321 aa, Bacillus licheniformis
VKRGDTLYQIANRYRTTVNEIVATNEIPNPNRLVVGQTIVIPIAGEFYEVRQGDTLASIGARFNISPAELARINRIQVSAVLPVGLLLYIPPRPRRNIETNAYIEPRGESVSPALQQAAREASPYLTYLGAFSFQAKRDGTLEEPPLNNLKEIADRHRTTMMMIVTNLENEAFSDELGRIILTDQNVKNRLLDNIVAAARRYGFKDIHFDFEYLRPEDREAYNQFLRDARARFRQEGWLISTALAPKTRADQPGQWYEAHDYRAHGEIVDFVVLMTYEWGYSGGPPMAVSPIGPVRDVIEYALTEMPASKIVMGQKLYGYD

SEQ ID NO: 110 - DNA, 2011 bp, Bacillus licheniformis
  CDS (252)..(1508)
gaattggccgaaaacctccatcgctttatgaaggacgagagcggtatcaaattctttgctccttcccaagcccctatcacctcctttatttgaaggatacactttctagactgttcagtcaagaattatccgcttcacggttctattcaccattccagctgtaaaaaacggcgcatgatccttctgcaacggtcatagacatagcataaaaccccctgtcacatacagaggaacaaaaggaagtgtgccagttgtttatttatacagtccagccgggagattcactatttgtcatcggcgccaagttcggaatttcgattgaccagatccgattggcgaatgggttgatcgcaacaaacattgtccccggacaggctcttttaataccgctttatacatataccgttcagccgggagacagttattacacgattgcccgccggacgtttgtatccgtcgaagcattgcaaaaagcaaatccgtctgtaaccccttccaatatgaggccggggataaaagtgatgattccggaattgccgaaaaaaccgatcactgctttaggatattacacactgagaaacccccggttagaccaggaattgattcataattttgccccatacgccacgtatctggcattttttgaataccacatttcaagcgacggatcgttaagcgagctgaatgattcaccggccgtacaaacggcttggagacggcgcgttcctcccctcatgacagtcaccaatctaactgaatcaggcttcagtccgtctcttgcgcaccgcgtattaaatcagcctgccgtaagaaatcgcctcatcgacaatattgtccaaacgatttccagaaaaggatatgcaggcgtcaatattgatttcgaacagattttggaggaagacagagatttattttcaggttttctccgcctgttgaaagagcggctgaagccgtccggctatgtgttgacgattgccgttccgccgaaaacaaatgaaaatatcgcctggctgaaagggtatgactatggcggaatcggtgcagtgagcgaccttatcttcatcatggcatacgactggcaccacgggacaagcgagcccggccccattgctccgatcaatgaagtccggcaaacaattcaatttgctctccgccatgtccccaaagaaaaaatcgttctcggctttccgctttacggctataactggaccctgccctatcagcccggtgccgtataccccggaatcgccaaccaagacgccgttcagctcgccatgaagcaccaggcaccgattcaatatgatacaaattctgagtccccttttttcagatacaccgatgaacagggcagacggcatgtcgtatggtttgaagacgcacgcagcatcggaaaaaaactgcagctgatcaccgaatacggacttgacggcggcggcgtctggcagctcacactcagttttccgcaaggaacatggctcttgaccaaattctttcgcgtccgaaaagtctgacatcattatgtgatttattgtaaaataacaaaccgaataatcccgctaacgaattttgatactaaagatgtgtccttcacacaataacaaatttgaaaggaatgtttgcgattgaataatgcgatccatgaaacattggagctgcatgagctgttaatgtttaaaaacctttgtctgacaaagtcatcaacaatgacgggaatggttcaggatcaagagcttcgcgacatcttggagcgtgatgcatcccaaacaaagcatcagatcgagcatttacaaggtctattgtcagtgagaggtgaaaccgtatgaacgaattcatccaaaacatgacaggcatgggcgcgatgactgaacaagtcattgccaccgattttttaatctcggcaaaaaccggtgtcaaaaacattgccacagctatcacggaaacatcttctccagaagtgcgcgaaacgcttaagcagtatttaaacgacgcgattgacacccatgaacagatc

SEQ ID NO: 111 - protein, 419 aa, Bacillus licheniformis
LFIYTVQPGDSLFVIGAKFGISIDQIRLANGLIATNIVPGQALLIPLYTYTVQPGDSYYTIARRTFVSVEALQKANPSVTPSNMRPGIKVMIPELPKKPITALGYYTLRNPRLDQELIHNFAPYATYLAFFEYHISSDGSLSELNDSPAVQTAWRRRVPPLMTVTNLTESGFSPSLAHRVLNQPAVRNRLIDNIVQTISRKGYAGVNIDFEQILEEDRDLFSGFLRLLKERLKPSGYVLTIAVPPKTNENIAWLKGYDYGGIGAVSDLIFIMAYDWHHGTSEPGPIAPINEVRQTIQFALRHVPKEKIVLGFPLYGYNWTLPYQPGAVYPGIANQDAVQLAMKHQAPIQYDTNSESPFFRYTDEQGRRHVVWFEDARSIGKKLQLITEYGLDGGGVWQLTLSFPQGTWLLTKFFRVRKV

SEQ ID NO: 112 - DNA, 2014 bp, Bacillus licheniformis
  CDS (558)..(1511)
tggtagacggcaacaagcggctgcgcccttccgtctgcgacaggcacgacggcgtcatccgccggggtcaactgccgttttaaagccgatatggtctcctgccggacaagcggggtgtcacatggccgaaaaaatatagcattccccttccgcccgctccatggctgtgtacataccggcaagcggccctttccctctgtacgggtcgatatcttccagcaccgcttttttcccgagttctataaaccgctccgtcaagcccggacggctcaatatcaggacgtcgtctcccagcgcctgtttgcaccattgataaagcggcttgcctttccagcgggcaaacgccttcggttccccaaaacggcgcgaaagcccccctgataatatgacatgtatttctttcatacggctcaaccttccttcgcgtgttcctgcctgcgaacatcatagcaaaactttagaaatccgaacaagtctgtaaaatctctttttcaaaaggcatggcgggtttcatttatgcatattgtagttgtaacatttatagggggctggtcaccatgaaaaaaacatcgggttcgctgccttattttcaagatttatcacaggaaaacctttttttaaaagctgagctggcaagatcacatcaattgatacacgagcttgaagcaagctattttcaccagaaaaatcataagctcagccgggaaaacgcagcaatgaaacagcagcttcagcagctgtcattcgaactggagcggatttcggcaaacaaggaagacaagtcggccgaaacgctcaaccggataaaaagcgaattgctgagtaaaatcgtcgttcttcaggagcttcttcaaaaagaaacctatgcaagaaaacaagagatagaagaaaagcaccgccttcatttaacaaatgtaaaagccgaagaagagaaaaaaagcttacatagccaaatagaatacgaaaagcttcatgcagaaagagaaaaaacgctgagggaaaaaaaggaacaggagctcaaaaacgctgcatacgaaaatgcccgcctgaaagatgaacttcatgctaaaagtcttcagctcaaacaaatcgaaactgatgttgcggtattaaaagagcgggtgacggaaacgaaaagccggcttttggaggctgaaaaaacaaaagaagcgctgttttatgaaacgattctctcttataaaaggcaactcgatgaaagtgataagtggatcgcttctcattttgccgatattgatgcatttcagcagacggagaaggcgcttgaacaaaacgaggaggtttttgaacggacagaacagatcgaggcggtgcttcaaactgttacagagcaagttgatcagctccaacaacaattgagcgccattcaacaaaattatacgaaaatggatcaaaaaataacagaatggaaaaaacaggcgaaagaagaaacacccccgcaaaaatgggtctatcaaattaaacgcaaagacaaagaaacaaaacctttaaattaaataccactttaaggaataatttggtttttacaaaaaaaccgcttgagtagattgtctcaagcagttgattgggcggcggcgtataaagcggccgcctttatgttcccttaaaatggaaacgctatctgaaaaagcaagggtttgacctattgctgctctgtctcagtagaaatctcaccctctaatatatattgaccgcggtatggttttttgacttccgggtacattttaatcaggctttgcataaaggttgtcatattagggatctcaagtccgctctctttttcgatttctttttgaagttcggagcttttgatggccgcattatggcgttttaatgttttaatcgccgcttcacgcaattttgcagcttttgagcctggacgtgctgtaccccttctgcgccttgtcgttccatctggaattccggcaggcagtgaggaggtttgcggagaagtctgctgctggttcttttgagatgcttgcggctgctgttgctg

SEQ ID NO: 113 - protein, 318 aa, Bacillus licheniformis
MKKTSGSLPYFQDLSQENLFLKAELARSHQLIHELEASYFHQKNHKLSRENAAMKQQLQQLSFELERISANKEDKSAETLNRIKSELLSKIVVLQELLQKETYARKQEIEEKHRLHLTNVKAEEEKKSLHSQIEYEKLHAEREKTLREKKEQELKNAAYENARLKDELHAKSLQLKQIETDVAVLKERVTETKSRLLEAEKTKEALFYETILSYKRQLDESDKWIASHFADIDAFQQTEKALEQNEEVFERTEQIEAVLQTVTEQVDQLQQQLSAIQQNYTKMDQKITEWKKQAKEETPPQKWVYQIKRKDKETKPLN

SEQ ID NO: 114 - DNA, 2341 bp, Bacillus licheniformis
  CDS (501)..(1838)
aagcgaaaggcgagtcatttgaaggaaaagtggctgtcgccaatgtcgtcctgaatcgggtgaaagacagccgatttcctgacagcgtaaaaagcgtgatctatcaaagaaacgcttttgagcccgttctaaacggcagcatcgagaaaaaagcagaccgcgaatcagtggaagctgtggaagaagcggtagatcaaaataaaaaagaaacagaagctttatttttctataatcccgacatcgcttctgatgactggattaaaacgagaaaagtcgtgaagcgcatcggcaatcatgtctttgcgatctagaaagcagtcagggccattcgccttggctgctttttttgtgcgattctttcttacgcattatcatctttcacagcccaagaaaaaatttatttttgatactttatgaaaatcaattttcaattaaaaagaaaataatttttagacttgtctcatatgatgggataaacccgtgagacaaggagagacctcatgaaccgttttgtaaaaggaatcgttcttctttcgctagctgctttttttgcagaatgtcttgaattcgtcatcaacatgattcttgcacgggagcttggcgagcatggcatggggctctacatgagtgttttgccttccatttttttggtcgtggtgattgcgagccttgagctgcccgtatcaatatcgaagtttatcgccgagtccaacccgaagctgcacgaaagcatgctgaaacatgcattgcggatgactgcggtctgcacggttttctccacggcagccgcagtgatcattcttccatttattccggtttttgattcttaccaccctctaatcagaggacttgtgatcgggatgattcctacggttgcattcacatcgatcgcgagaggctacttcatgggcgttcagcaaatgggtaaaatcgcaacggcgaatgccttgaaaaaaatctttcagctcatcggcttgtttttattttttcaatggtattcctttgaattggatacttctcttctcatttcattgtttgtcctcgttgcaagtgaagtggtcgtgtttgtttatttgttttcgcagtttgttttggtcaggcgtgccgctcaaaaagggcagcagatccacttgcggagaaacgatgttttaaaacgcctgctcactgtttcgatcccgacgacggggctgcgcgtgtttcatgctgtgacaaatgccgtcgaaccttttttggtgaaggggacgctgcttgccgctggcgtatcaagaacatcggccatcgaccagttcggcatgctttcgggagttgcgatgacaatcggcttttttccggcttttatcgcccattcactgatggtcgtcatgatcccgagcatttctgaaagctacgcttacgggcaatacgaaagagtgatcaaacggattaaacaggcgatctttattacgctgttttacggcataccgtccgtcatggtgatgtatcactttgcagagccgctgacccatttatttttcgattcggtcaaggcgtcgttttaccttaaaatgttgtggccgtattttttattccacttttttgcgatgccttttcaggcctgtttaatcggaatggggttggccaaagatgctttttatcataacgtttgggccagtgtcttatcgtttttgatgatgtatgttctcgggtccatgcagactttgcagatgacggggatcattcttgcgatgaataccggtatgattttgctgacggcgctgcattatgtgacgatttgcaaggagctgggcgtcacgctttttttgacaaacaaatcccgatctccgagaattgaaagccgctgatggatcctcttcatagttttagcttttgcggggaagctaatattaaaaaagaaggggagttcccatgcgaagaatcagtctcatttacccgctcatcctgctgttttttaccgggttattcgtatttcagccgcaggcatctgcaaaacaagcttcgccggcagtcatgcagatgaacacggtcgaaggtcagcgcgtcgtcattcccgccgaaggccagaagacgatcgttcatttttggacgacctggtgcccgccatgccgtgaagagcttccgcgattccaatcctactatgaaagcaagcaatccggcgtcaagctcgtgaccgttaatttactgaatgccgaaaagaacgaacagaaggtaaaacagtttattaaagcaaacaagctgacatttccgatcgtttttgacaaaaagggtgagatgatgaaagcatataaagtcatgacaattcctacgacttttttctttaatgaaaaaggagagctggagaaaa

SEQ ID NO: 115 - protein, 446 aa, Bacillus licheniformis
MNRFVKGIVLLSLAAFFAECLEFVINMILARELGEHGMGLYMSVLPSIFLVVVIASLELPVSISKFIAESNPKLHESMLKHALRMTAVCTVFSTAAAVIILPFIPVFDSYHPLIRGLVIGMIPTVAFTSIARGYFMGVQQMGKIATANALKKIFQLIGLFLFFQWYSFELDTSLLISLFVLVASEVVVFVYLFSQFVLVRRAAQKGQQIHLRRNDVLKRLLTVSIPTTGLRVFHAVTNAVEPFLVKGTLLAAGVSRTSAIDQFGMLSGVAMTIGFFPAFIAHSLMVVMIPSISESYAYGQYERVIKRIKQAIFITLFYGIPSVMVMYHFAEPLTHLFFDSVKASFYLKMLWPYFLFHFFAMPFQACLIGMGLAKDAFYHNVWASVLSFLMMYVLGSMQTLQMTGIILAMNTGMILLTALHYVTICKELGVTLFLTNKSRSPRIESR

SEQ ID NO: 116 - DNA, 1417 bp, Bacillus licheniformis
  CDS (420)..(914)
cagcagcttattttcgagccgaaaccgctccatgatgctgatcccgcctcctgctccctgtgaggtgacaatcggaatgcccgcctggttgatcgcctcaatatcccgataaatcgttctgacagagacttcgaacatgccggcaagctcctttgcctgcacttggcgtttattaatcaataaaatcacaatggccaaaagccggtcaattttcactgcagatccctcacattcatcttgtgcagcctctttttttctgctattttcattccatagcgcacaccattctgggatatcatgacaaaaaagaggatctcatcacccatttatctagaaaaccacttttcaggttacgatttgtacagtttggacatatactccttaaaaaaggaggttttaaaaacatcatattttattttttgcagtttttcatcattgtgtccatcgtctatatcaagttcaaacggtcggtcggttatcagcctttaaagccggcacgcatgttgttccggatcatccttttttcgggaattttcgtttttctgctgacgatgagcgcacttcaccctttatcatacttttatgatctgattgggatcgcgctcggactcatcttgaccgtctatgcgctgaagcatgtgtcgatcgaaaatcggggcggagtcctttatttcagaacgcatttatgggttgaattgatcgtactctttttatttttataccggtttctgtaccggatcgccgagatcggccagctgcagactgcggtttcagacgggggttcggcagcttacggcgccctttttgcgcaggacccggcgacgatgatcggtttttttgtactggccgtttattatgtcggtttctctttttttgttttaaaaaaaggcagaaccgaagaaaagcgctcagcttaaaaaggcaaactcgggaaattgagtttgccttttaaactttagtcatgttgtgtatgatcgatcatctgctgaagtacatcgaggacatgctggtcttccggagaataaaaaatggaagtccctgcccttcttgatttgacgagacgaaggttttttaaaaacctgagctggtgagaaacggttgactgcaggagactcagcttctctgctatttcattaaccgaatgctcgccttgtgagagcaggtgaagaattttgattctcgttgggtcagagagcgctttaaacgtctgtgaaacgagaaataaagtttcttcatctaactcggcccgcacctgtttttctgttgtttcttgattgtgctcactcatgcttttcaccttttccgcgcgacttttacctccatatcatataccaaaacataccggttgaaaagttttaacggatcaagtcgaaaacagcgttccttgaagcgcttctacatatcttgcagcagacct

SEQ ID NO: 117 - protein, 165 aa, Bacillus licheniformis
LQFFIIVSIVYIKFKRSVGYQPLKPARMLFRIILFSGIFVFLLTMSALHPLSYFYDLIGIALGLILTVYALKHVSIENRGGVLYFRTHLWVELIVLFLFLYRFLYRIAEIGQLQTAVSDGGSAAYGALFAQDPATMIGFFVLAVYYVGFSFFVLKKGRTEEKRSA

SEQ ID NO: 118 - DNA, 2353 bp, Bacillus licheniformis
  CDS (501)..(1850)
aaaacagccgcagcaaaagcagcaggccgctcctgcacagccgaaaaaacaagcacagccaaaggctgcacctaaacaagccgcgcctaaaaaacaggatgccgttgcagccaatatgccgggcggattctcgaacaacgacattaatctgttggcccaagcggtttacggtgaagcgcgcggagaaccgtatgacggccaggttgccgttgcagctgttatattaaacaggctcgatagccctacgttcccgaatacggtggcgggcgttatctttgaaccgcttgcatttacagctgtcgcggacggacagatttatatgacgccggatgaaacggcgaaaaaagccgttcttgacgccatcaacggctgggatccatcagaaaatgccacttactattttaaccctgacacggccactagctcatggatttggggcagacctcaaattaaaaggatcggtaaacacattttctgtgaataaaagcgaggtgctataaatgatcagaggaattttaatcgcccttttaggtgtcgccatcgtcggaacaagctattggggctataaagaacatcaggagaaagacgccgttttgcttcatgccgaaaacaactatcaaagggcatttcacgacttaacttatcaggtggatcagctgcatgataaaatcgggagcacgcttgcgatgaacagcaaaaaaacgctgtctcccgctttggcggaagtctggaaaacgacttctgaagcgcataacaatgtcagccagctgccgctgaccttaatgccgtttaacaagaccgaagagtttttggcaaaggtcggagatttcagctacaaagcagccgtgcgcgatcttgacaaagagccgctcaataaaaaagagtacgcttctttaaatcagctatatgaaaattcaaaggatatacaaaatgaactgcgtaatgtccagcatttgattattgacaaaaatttgagatggatggatgtagaacttgcgctcgcgtccggccaaaaacaaagcgacaataagattattaatggctttaaaaccgttgaaaaaagcgcaagtgcattttcggatacggatttaggcgcgacagagatgacgaacacgaaaaaagagcagcaagggtacgaccatttacaaggcaaaagaataaccgaaaaagaagcgcgcaagattgcccaaaaattcgcccaggacaaaaattacaatatcaaagtatcgaaaagcggcaagaaaacgaacagggatgtatacagcatcagtatgcaggaccctgatcaaaaagcggatatttatatggacattaccgaaaaaggcggatatccggtttatctgattcaaaacaaaaaaattaaagatgaaaaaatcagcttaaacgatgcgtcaaacaaagcccttcaatttttgaaaaaaaacggctataaaacggaagacctgaagatggatgaaagctcgcaatacgacggcgtcggggtgttttcatttgttccggtccaggacgatgtctggctctatccggacagcatccgcatcaaggtcgcgcttgacgacggcgagattaccgggtttaatgcaaaggatttcttaatctcccataaaaaaagagacttgccgaagcccaaactaacgcctgaaaaagcgaaagcaagcctgaatcccaacgtaaaagttcaggagacgcgccttgctttagtcacgaacgagctttcgcaagaagtgctctgctacgaaattctcggcacgattgaaaacgatacattccgcatgttcatcaatgccaatgacggcacggaagagaaggttcagaaaatgaaaagcgcagaaccgatatacaacgacttgtaaaaacgatagatcaaagggaaaaggcgataacatgccttttcctttttagcattcggaataattcgccctaaacatttccatactgaacatatgggcggaacgtccgccggtaaattgaaaatgcccggggccataaattttccgggcagcggaggaataatatgaaaacaatcgaacggttattatttaagatactcgtcgtacagacggtcattttaatcagcgtgcagcttctttttcatttctccaaggctgagccttatctgtcaaaggtcgtgcagtatgaaggcgtgaacaacatgaaaatcggcgaatggatcgagacatttaagccgtaattcacgctaaaatctcccctttttcgcctaatacatgatacaatcctataaggagtaccagatagcaaggagaggaattatggaaaagaaattatgcattgcaatagacggccctgcggcagccggaaaaagcaccgtggcgaaaatcgtggccagaaaaaa

SEQ ID NO: 119 - protein, 450 aa, Bacillus licheniformis
MIRGILIALLGVAIVGTSYWGYKEHQEKDAVLLHAENNYQRAFHDLTYQVDQLHDKIGSTLAMNSKKTLSPALAEVWKTTSEAHNNVSQLPLTLMPFNKTEEFLAKVGDFSYKAAVRDLDKEPLNKKEYASLNQLYENSKDIQNELRNVQHLIIDKNLRWMDVELALASGQKQSDNKIINGFKTVEKSASAFSDTDLGATEMTNTKKEQQGYDHLQGKRITEKEARKIAQKFAQDKNYNIKVSKSGKKTNRDVYSISMQDPDQKADIYMDITEKGGYPVYLIQNKKIKDEKISLNDASNKALQFLKKNGYKTEDLKMDESSQYDGVGVFSFVPVQDDVWLYPDSIRIKVALDDGEITGFNAKDFLISHKKRDLPKPKLTPEKAKASLNPNVKVQETRLALVTNELSQEVLCYEILGTIENDTFRMFINANDGTEEKVQKMKSAEPIYNDL

SEQ ID NO: 120 - DNA, 1355 bp, Bacillus licheniformis
  CDS (249)..(1355)
attccccctgatgtcatgatggatcttccgagaattacgatgataggaagacttcacatatatattgaaaaccacagagggcttttgcttttcagcgatacggaagtaaggctgatgctcaaacaggggcagtgcatcattcaaggcaaagactttgtcatcaaaacgattttgcctgaggaaattctgcttgaaggcacgattgagcttgtccgctatatcgattcataagtcggggggaaagaagcgtgaagaataaatggctttcttttttttcaggaaagatccagcttaagataacgggaaaagggatcgaacggttattaaatgaatgcaccaggcgcaacatcccgatgtttaatgtaaagaaaaagaaagacgccgtctttctttatattccgctttctgatgtacatgccttccggaaggtcatcagaggcttcgactgcaagtgcaggttcatcaaacgaaaagggtttcctttcctcgtgcagaagtctaaacggaatagcggcttcacttttggagttgctgcattttttatcatcatgttcctattgtccaacatgctttggaaaattgatattacaggagccaatccagagacagaacatcaaatcagacagcaattggatcaaatcggcgtcaaaaaaggccgctttcagttttcaatgctgaccccggaaaaaattcagcaggcgctcacaaagcgggtcgaaaacatcacttgggtgggcattgagttaaacggtaccgcccttcacatgaaagtcgttgaaaagaatgaacctgacaaagaaaaatatatcggtccgaggcacatcgtcgccaaaaaaggggcgaccatctcgaaaatgttcgtggaaaaaggcgagccgctcgtcacggtgaaccagcacgttgaaaaagggcaaatgctcgtttccgggctgatcggaagcgaagaggaaaagcaaaaagtcggagcaaaagggaaaatctatggtgaaacctggtacaagtcaacagtaacggttcctcttgagacatcatttgacgtttttacgggtaaagtaaggacaagtcacaagctatccctcggatcattaaccatgccgatctggggcttttcatttaaaaaagaagacttctcgcgcccgaagacggagaccgaaaaacactcgctgcattttataaattttaagcttcctgtcgcttatgaaaaggagcatatgagggagagcgaacaaatcaaaagggtgtactcgaaaaaagaagcagttcttagaaggaatcgaaatgggaaaaagagacatcaggacaaaaatcggcagagacgggaacattatcagtgtaaaagttttgcacaccacgag

SEQ ID NO: 121 - protein, 369 aa, Bacillus licheniformis
VKNKWLSFFSGKIQLKITGKGIERLLNECTRRNIPMFNVKKKKDAVFLYIPLSDVHAFRKVIRGFDCKCRFIKRKGFPFLVQKSKRNSGFTFGVAAFFIIMFLLSNMLWKIDITGANPETEHQIRQQLDQIGVKKGRFQFSMLTPEKIQQALTKRVENITWVGIELNGTALHMKVVEKNEPDKEKYIGPRHIVAKKGATISKMFVEKGEPLVTVNQHVEKGQMLVSGLIGSEEEKQKVGAKGKIYGETWYKSTVTVPLETSFDVFTGKVRTSHKLSLGSLTMPIWGFSFKKEDFSRPKTETEKHSLHFINFKLPVAYEKEHMRESEQIKRVYSKKEAVLRRNRNGKKRHQDKNRQRREHYQCKSFAHHE

SEQ ID NO: 122 - DNA, 2120 bp, Bacillus licheniformis
  CDS (501)..(1625)
aactaacggtaaagaaatctttgtattcggcgatcaattcggaaggggaggaagcattgtttaccaagatctcggcttaaaggcgacaaagctgacaaaggaaaaagcaatcgacgaaggcccgggctacacgagcatttccttagaaaagctgcctgatttcgctggagattatatatttataggaccttgggaatcaagcggagacgacagcgccgtgcttaatacatccatttggaagaaccttggggcggtcaaaaaccaacatgtctataaaatcgaccctgtcggcttctatttttccgatccgatttcattagagggccagctcgaatttattacagaaaacttaacaaaatagaagaacttccgccttgtcaggcggaagttttttttgcgcgcgaaaccggggtgaaccctcattgaaaaagcgattttcaagtgcaagccgggagagtttttaaacgagcattcctcatatgctattgtgggagggatcattgatggcattcatcaacatcaaaccggagttaaagcagaatatggaaagactgtctgacattctgaacatacccgaaccgcttttaatcagtgcaaatgcaaatgtatccgcggacgaactttattttccgggagtatcttttcatgcaggaaaaaacgttcaagcagcagaaacatatgaacagctgcaattattggcgaatcaatacacgtttgaagatgaacagtggctgacaaaaacagccgtttacgattcagcagaactgaaaaaggaaattggcagattgacggaatgctttccgtttgttacttcccgtatcatcggccgctcaagcatgggccagcctatatatgaactgctccttggagctgaaaatgccggaaaaagaacgcatatgaatgcctcttttcatgccaatgaatggatcaccacttctgttttgatgaaatggctcaaagaatactgttatcatttatgtacaggccagaccgctttaggtttttcgccgctcgatattttttcatcaacaaagctttccgtcgtgccgatcgttaatcccgacggtgttgaccttgtacttaacggccccggtcatcttgggatcgcgagagaagcgctggatgagatgaacgagcatcagccggatttccgggaatggaaagccaatataaacggagtggatttaaataatcagtttccgtctttctgggagatcgaaaaacaaagaaaaccgcctaaatccccttcctacagagactaccccggagatgaaccgctgacagaaccggaagcggcagcgatgagggatttaatcgcaaacgagccgcctgaccggcttgtggcgcttcacacacagggggaggaaatttattggggatacaagggattggagcctcctgaatcagctgatgtgatccaaacatttgagcgcctgagcggttataagggcgtcagatatatagacagctatgcaggatttagagattggtttattcattattacggaagagaaggatatactgttgaacttggcaaaggaaaaaatcctttaccgctgaaacaatttgacgatatatattgtaaaagcagaggaatactttgggcatcctgtttttttgaaagctgaaacttttcacggtgaaaatcgtaaattagacagccaaacatttatggagggagaatggccggtttgagagtttcattattgattattgccgctctgatggccgtggctgcggctggttgcacgccgcagcatcaagaaggatcaaaaagcgttcatcatgaggagccggaagggaaaagagaaagcggtgcagcagtaaaagataaaaaagtgatagcgctgaaggaccggcactttgatgagacggcaggatggcttgataatgaaaccgttatatacaccgcaaccgatccggtcggaggaagtgaaatcaaatcatatgatatatttaaagggacgggcaaaacgatctacaagacagatgacaggctgatagcgtcggaagtcaacagtgaaaaaggcatgattcttatccaaaccgccggaaacggctctgaaatgaagttaactttgcttaatttacaggggaaacagctgtttgcaaaaaaattt

SEQ ID NO: 123 - protein, 375 aa, Bacillus licheniformis
LMAFINIKPELKQNMERLSDILNIPEPLLISANANVSADELYFPGVSFHAGKNVQAAETYEQLQLLANQYTFEDEQWLTKTAVYDSAELKKEIGRLTECFPFVTSRIIGRSSMGQPIYELLLGAENAGKRTHMNASFHANEWITTSVLMKWLKEYCYHLCTGQTALGFSPLDIFSSTKLSVVPIVNPDGVDLVLNGPGHLGIAREALDEMNEHQPDFREWKANINGVDLNNQFPSFWEIEKQRKPPKSPSYRDYPGDEPLTEPEAAAMRDLIANEPPDRLVALHTQGEEIYWGYKGLEPPESADVIQTFERLSGYKGVRYIDSYAGFRDWFIHYYGREGYTVELGKGKNPLPLKQFDDIYCKSRGILWASCFFES

SEQ ID NO: 124 - DNA, 1597 bp, Bacillus licheniformis
  CDS (342)..(1094)
ccttttttattttcctaaattttcgaaaagccagttaatttatcccatatatcagaaggaaaagcgatggtcatctcaaaactgtaaccaattattttcttgatagtgtggctgcgactattatgcgctgattgtttacggtgcttgctttttataccattggttcatttgaccggaatcgtgttttgattgcaggaatttttgttactgtttgtgaaaaaacagcagaagaaaaacagcggaaaactcgcgtcttagggcggatttccaaaaaaatgtcgtaaattcgatgcatcaatttgatgaaatcgcccggccatgcggtataatagattttgtgaatgaaagattcaatgttgaaagagagtggttacatcatgggccgtaaatggaacaatataaaagagaagaaagcgtccaaggatgcgaatacgagccgaatctacgcgaagttcggccgcgaaatctatgtggcggcaaagcagggagagcccgatcccgaactgaaccagaacctgaaattcgtgcttgagcgcgccaaaacatacaatgtcccgaaagcgattattgagcgggcgatcgaaaaagcgaagggcggctctgaggaaaattacgacgagctgcgctatgaaggcttcggtccgaacggagcgatggtgatcgttgacgcgttgacaaacaacgtcaaccgcacggctgccgatgtgcgctccacatttggcaaaaacggcggaaacatgggagtgagcggatctgtcgcttacatgtttgatccgacggccgtcatcggctttgaaggcaaaacggctgatgaaacgctcgaattattgatggaagcggatatcgatgtccgtgatattttagaggaagacgatgcagtgatcgtctatgccgagcccgatcagttccacgccgtacaggaggcgctgcaaaacgccggcattactgagttcacggtggccgagctgacgatgctcgcgcaaaatgacgtcgcccttccagaggacgcgcgcgcacagtttgaaaagctgattgacgcgctggaagatctggaagacgttcagcaagtttaccataatgtcgatttaggggcgtaaaaagaggccctgaaaaaatcgggaaagaaaagatagatgaacaggaggacgacctgttttgtctatctttttttattgtaaagttaacttgacattttatttttttgttaagtatactttacgtatagtgaactttacattcccaatggaggaaagatgaaaacgttaataaaggaaaagcgcacttcgctgaacatgacacaagaagaactggctaaaaggcttaatgtgtcgaggcaaacggtgatttcccttgaaaagggaaaatataaaccttcactcgttctggcgcataaactggctcaaatttttgaatgtctgattgaagatttatttatttttgagggggatgaaaatattgactgaaacgatgacaaacatactgatcgctttagcgggcttagaataggcgtgctcgggatcgcaattgtttacaaagtaaacagacgaattggaaaaaaagagaggctgttcgatgagcgccagcagaagattagcta

SEQ ID NO: 125 - protein, 251 aa, Bacillus licheniformis
MKDSMLKESGYIMGRKWNNIKEKKASKDANTSRIYAKFGREIYVAAKQGEPDPELNQNLKFVLERAKTYNVPKAIIERAIEKAKGGSEENYDELRYEGFGPNGAMVIVDALTNNVNRTAADVRSTFGKNGGNMGVSGSVAYMFDPTAVIGFEGKTADETLELLMEADIDVRDILEEDDAVIVYAEPDQFHAVQEALQNAGITEFTVAELTMLAQNDVALPEDARAQFEKLIDALEDLEDVQQVYHNVDLGA

SEQ ID NO: 126 - DNA, 1888 bp, Bacillus licheniformis
  CDS (3)..(1385)
agaaggatgctgcgcgccggaatgtcgatgatgctcgtacaggcatcattgctttctccattctatatttgtccgccccgttttttgcagagatggcccttggcggaacagaaaacaacgggctgacgcttgaacatgtcgtgtatgtcattcgcatggtcagtctcgcgctactggttgtgccgatcttggcgctgatcagaggctttttccaaggtcaccagatgatggggccgacagccgtttcacaggtagttgaacaaattgccagaatcgtctttctattaacggccacttacttggtgatcaaagtattaaacggcgggcttgtcgtcgctgtcggctatgcgacttttgcggctttgatcggagcgttcgccggactgttcactctttacttttcctggcagaaaagaaaaggggcgctcctggcgctgaagccgaaccttgttccttcagccgatattacgtaccggcaaatgtttaaagagctgttcagctatgccgccccttatgtctttgtcgggctggcgataccgctttaccagtacattgatacgaatacgtttaataaagcgatgattgcagccggctatcaaaacatcagccaggatttgatggcgatcgtgacgctgtacgtgccaaagcttgtgatgattccggtatctctcgcgacggcattcgggctgacattgattccggcggtgactgaaaactttaccaacaaagatttccctgctttaaacaaacagattgatcaggcgatgcagatcattctcttcatcgttcttccggcatcagtcggtatggctcttttgtcggggccggtttacacgttcttttacggctcggaaagcctgctccctgacatgggacgagatattttgttctggtacgcgcctgtggcgctgttattctcgctcttcaccgtcaacgctgcaattttgcagggggtgaacaagcagaaatttgcggttgtcagcttgatgatcgggattgtgatcaaaatcgcgcttaacgttccgctcatcaagctgcttcaaggcagcgggtcgattttggcaacggcgctcggctattcagcttcactcctatacggatttatcatgattaaacgccatgccggctattcgtatcgcaaactgtttaaacggtttttgctgatgctgatcctgacggcggtcatgggcatcattttgctgcttgtccaggcgcttctaagtatttttatttcatacgaaggcgggcagatcaggtctgctgtcgtcattttcatcacaaccgcagtgggcgggtcagtttatctgtacttggcttaccgtgtgaaactgctcgaaaaaatcttcggtcagcgattgaatcgctttttcaaaagaaaggcctcctaaaaagggcttttctttttatgtaaaaaaaggggtgtcttcatgagattggataaactgttgtcaaacagcggctatggttcgagaaaagaagtcaaaaaaatgctgaaaaacggcgcggtgcgcgtcaatgatcaattagtcaaagacgccaaaaagcacgttgacccggaatcagacgacatcacggtatacggggcacccgtcatgtaccgggaatttatttacttaatgatgaacaagccgcaaggagtgctgtcagcaacagaagacagccggcaggaaacggttgtcgatttgctcgacccggagctgctgaggtttgagccgtttcctgtcggaaggcttgacaaggatactgagggactgctgcttctgacgaatgacggacagttggcacaccagcttttatctccgaaaaaacacgtacctaaaacgtatgaagtccatgtcaataagccgattgatcaagcggcacttgatcagcttgaaaaaggggtcga

SEQ ID NO: 127 - protein, 461 aa, Bacillus licheniformis
KDAARRNVDDARTGIIAFSILYLSAPFFAEMALGGTENNGLTLEHVVYVIRMVSLALLVVPILALIRGFFQGHQMMGPTAVSQVVEQIARIVFLLTATYLVIKVLNGGLVVAVGYATFAALIGAFAGLFTLYFSWQKRKGALLALKPNLVPSADITYRQMFKELFSYAAPYVFVGLAIPLYQYIDTNTFNKAMIAAGYQNISQDLMAIVTLYVPKLVMIPVSLATAFGLTLIPAVTENFTNKDFPALNKQIDQAMQIILFIVLPASVGMALLSGPVYTFFYGSESLLPDMGRDILFWYAPVALLFSLFTVNAAILQGVNKQKFAVVSLMIGIVIKIALNVPLIKLLQGSGSILATALGYSASLLYGFIMIKRHAGYSYRKLFKRFLLMLILTAVMGIILLLVQALLSIFISYEGGQIRSAVVIFITTAVGGSVYLYLAYRVKLLEKIFGQRLNRFFKRKAS

SEQ ID NO: 128 - DNA, 1852 bp, Bacillus licheniformis
  CDS (501)..(1349)
tcactttttgaatcagctgtcagacgctttgaagctggaaaacacagctttttaccatgaccgcgcggaaacattcggaagatcgaaagaccacagagaaagctatgacgttgtgacggcacgcgctgtcgcccgcctttcggttctcagcgagctctgccttccgcttgtgaaaaaagacggtttattcgtagcattaaaagccgcttcggctgatgaagaaattgaaacgggcaaaaaagccatcaaaacgcttggaggcaaaattgaaaccgtacattcttttcagctgccaatagaagaaagcgaaagaaacatcattgtcatcaaaaaacaatcgcagacaccgaagaaatttccaagaaagcctggaacacctaataaatctcctattgaaggttaaattattcgttttcttcaaatttcgtgatgtcacagaaggaaaattcatgagaaaatagaattataaaaatggcagtgtttaaaggtggtgtaggtacatgaagcattcattctctcgtctcttcggacttggcgacaaggaagaagaagcagagattgctgaacatgatacgaataaagaagaaattcaagagattccagtaggcgatataattcctaaccgttttcagccgcgcaccattttctcagaagaaaaaattaaagaattagctgcaaccattcatacacacggcattatccagccgattgtcgtcagaaaaacagagcgggaaggccaatatgaactcatagccggagagcggcgctggcgggcggttcaaacgctcgattgggagaaggttcccgctattattaaggatttttcagatacagagaccgcttctgtcgctcttatcgaaaaccttcagagggaagaattatcttcgattgaagaggcgcatgcttatgcaaggcttttagagcttcacgatttgacgcaggaagcccttgcacaaaggcttggaaagggccagtcaacaatcgccaataagctcagactgttaaagcttccggaagaggtgcaggaagcgatcttgaaaaaagaaatttcagagcgccacgcaagagcgctcataccgttgaaacagcccgaccttcaggtcaagctgctgcatgaagtcattgaaaagagtttaaatgtaaaacaaaccgaagaccgtgtcgtcaaaatgcttgagcaggataaacgcaagcctaaaccaaagagaaaagcgtacagcagggacgcgagaatcgcgatgaatacgattcgccagtccttatcaatggtggaagacagcggcgtcaaactgaatacggaagaagaggaatttgaagaatatattcagtttacgattcgaataccgaaataaaagctccctatagagcttttatttttttaggcaaaatatctatgggggagcgtctatggaatattatcgacaatatcattcattgcttttttcgattgcttaccgtatgctcgggtcttttcaagatgcagaggacatcatccaagaattgttcgcagaccttcaggaaaaagatatcggtcaaattgaccatattcaagcatatttaacgaaatcaatcacaaaccgctgcataaatgaactgcagtctgcccgcaagaagcgggaggtatatatcggggaatggcttccggaaccgcaggtggcgctttcagctcaaatcccggctgagtacgttgaagagaaagaaaaggtatcctatgcttttctggtagttatgagccgattaaatcctgtagaaagagccgttttgatgtttagagaagtatttggatatcattacaaggaaatttcgtccattatcgggaagtcggaagcgaactgtcgtcaaatccacagcc

SEQ ID NO: 129 - protein, 283 aa, Bacillus licheniformis
MKHSFSRLFGLGDKEEEAEIAEHDTNKEEIQEIPVGDIIPNRFQPRTIFSEEKIKELAATIHTHGIIQPIVVRKTEREGQYELIAGERRWRAVQTLDWEKVPAIIKDFSDTETASVALIENLQREELSSIEEAHAYARLLELHDLTQEALAQRLGKGQSTIANKLRLLKLPEEVQEAILKKEISERHARALIPLKQPDLQVKLLHEVIEKSLNVKQTEDRVVKMLEQDKRKPKPKRKAYSRDARIAMNTIRQSLSMVEDSGVKLNTEEEEFEEYIQFTIRIPK

SEQ ID NO: 130 - DNA, 1495 bp, Bacillus licheniformis
  CDS (501)..(995)
gcagacctgactacgaaggcatcctgtcaaagctgagcaaaaaagccttttcgattttgctcgtccatgagcctgatgccgctttaacggcaaatcaataccccgtcaatctgcaaatatccggacacacccacgcgcggacaaattcagattcctgtattcggtcctttgattacgcctccgtacgtagacgtttatacgcaaggaatgtatgcaacagccggaatgaaaatttatgtcatttgaggaatcggcacgagcaggctgccgctccgctttctgtcaaagcctgaaatcaccgtgttccagcttgaatccatttaatcttgcccggtcctttggctcaaaacaaaaggcatctgcatacattaagtaaaaacattcccgctccatttcatccaatcccatcaaaaaaacggaacttcctcagcctcttccgtctatatattagcagcggaaaaggctctcttttcgtttttgaaaaggagatgtgctgattattgctgatgtaccaagtcaaacccggaggaacccttgaaagcatcgccgccgatttcagaacgacccggcaggcgttgctgcaggcgaatcctggcttaaacggcggccaagtgtccgcgggccagtcgattatcattcccggcatcagaaatccggacacaattccataccggattgccgtgtctctcaacggaagaacgctcagattgtatgagcgagacagacttgtaaaaacatatccgattgccgtcggaaaaatcctcacacagacgccgagaggcgaatttgtcatcgtcaaccggcagccaaatccgggcggcccgttcggcgcctactggctgagcctgtcaaaacagcactacggcatccatggaacgaataacccttcgtcaattggcaaagctgtttcaaggggatgtatccgcatgcacaatcgggatgttctggaacttgcttctatcgtacccaacggaacccgagtgtccattacaccttagacgagtacatttccagacaaatgcaatttgaacaatacaacatcttgtattaagatataatgggacctttagggtaaggagcgtatatatggatctttttaaaaatcgtaatttcgtccgactttttttcgcagctttcgcttctcaaatgggaacgacagtcggaaatatggctttcgcctttttcttgctcgaccggttcagcagccagccggcctatacgacaatcgccgagctgatgtattccttgccgacggttttcgtattctttatcgtcggggtggtcgctgaccgttttgaccgcaagaaagtcgcggaaaactgtgattggatcagaggcgggactgactgtcgttcttttctttgtattgtatcttcaaattataccgcttgtgtttttagtcctatttatcagaagcgcggttacaaaatttttctacccggccgaagcaagtttggtccaggccattttaagaaaggaccagtatgcaaaggct

SEQ ID NO: 131 - protein, 165 aa, Bacillus licheniformis
LLMYQVKPGGTLESIAADFRTTRQALLQANPGLNGGQVSAGQSIIIPGIRNPDTIPYRIAVSLNGRTLRLYERDRLVKTYPIAVGKILTQTPRGEFVIVNRQPNPGGPFGAYWLSLSKQHYGIHGTNNPSSIGKAVSRGCIRMHNRDVLELASIVPNGTRVSITP

SEQ ID NO: 132 - DNA, 1897 bp, Bacillus licheniformis
  CDS (501)..(1397)
tttccatcgcggtgcagttttatacggaggccaaaacggtcatgaatgtaccaaagaccgtatttgtccctcagcctaacgtagattccgcggtcatcaggctgacgctgaggaaagagccggctgtggccgttcaagatgctgcctttttctttcaagtcgtaaaagcaagctttgcacagcgtcgaaaaacgcttttcaacaacctcgtcaacaatctgccgaatggcaaagagaataaatcaaaaattgaaagagcgcttcaggattcacatatcgacggaaaacgacgcggagagtcgcttagcattgaagagttcgccgtcttatctgaccgcttgagagaagtccttctttaatggagggctttttttattgatgccgggctttaagcctgatcaggcttgtcatccgttcaccacttgaagggcaggcacataggctaaagaagcacctttactttttcgttgcttgatgttcatcaggatggggcttagtctatgtgtggagtgaaaagcatgcaatttaaaataggcgatatggtcgtcagaaaatcttatcgaagagatattttatttcgaattataagaattgatcaatcggcaaatggagaacctgtagccgttttgcacggagatgaggtcagattaatcgctgacgcgcatttgggggatcttgagattgtccgcgaggctgagtggcagatgagaaagcgggaagaagaaacgagaatgaaggaatccctcgatcttctccgccaggattacaaactccttcacgataaacatgagtaccgcgccacaaaccaatataacaatcaacagcagtactttcatatgcccggaagagtccttcatttagacggggattcggcttatttgaaaaagtgtctggcgctctacgaaaagatcggggttcctgtatacggcattcattgctatgaaaagaaaatgtcatcagtcatcgaggaactgatcgatgaataccgcccggatcttctcgtcattaccggacacgatgcctattctaagcagaagggcgatattaacaatctggatgcctacaggcattcaaaagattttatcgaaaccgttcaaaaagcgagaagaaaaattccccatcttgatcagctcgtcatttttgccggcgcatgccagtcccattttgaatcactgatcagagccggtgcaaatttcgcaagctctccgtccagagtcaacatccatgcgcttgatccggtctatatagtcgcaaaaatcagcttcactccgtttatggaccgcattaacgtctgggaagtgctcagaaataccttgacgagagaaaaggggctcggaggtattgagacgcggggcgtattgcgtattggaatgccatataaaacaaaagcaaacgattaaacgagcccgccggatggcgggtttttgctatgcacacgaaatgtttttaccttttttttaaaaacatacataatgaaacgaaaaatgaggaaaataagggaaagtcggcgtataatttgtcacaaatattttattgacagaggcttatgaacgttgatataatttaaattttatttgacaaaaatgggcttctggtgtatactgaatatagtgaggtggatgcaatggcgaaaacgttgtccgatattaaaagatcgcttgatggacatttgggaaaaaggctgacgttaaaagcaaacggtggccgccgaaaaacgattgagcgttcgggcattttagctgagacgtacccttctgtttttgtgatacaactagaccaagacgagaattcgtttgaaagagtttcatacagttatgcggatattcttactgagacggttgaattgaggttttccgatgataaaaccagctcagtagccctttaataagcagtggac

SEQ ID NO: 133 - protein, 299 aa, Bacillus licheniformis
MCGVKSMQFKIGDMVVRKSYRRDILFRIIRIDQSANGEPVAVLHGDEVRLIADAHLGDLEIVREAEWQMRKREEETRMKESLDLLRQDYKLLHDKHEYRATNQYNNQQQYFHMPGRVLHLDGDSAYLKKCLALYEKIGVPVYGIHCYEKKMSSVIEELIDEYRPDLLVITGHDAYSKQKGDINNLDAYRHSKDFIETVQKARRKIPHLDQLVIFAGACQSHFESLIRAGANFASSPSRVNIHALDPVYIVAKISFTPFMDRINVWEVLRNTLTREKGLGGIETRGVLRIGMPYKTKAND

SEQ ID NO: 134 - DNA, 1010 bp, Bacillus licheniformis
  CDS (501)..(734)
atcattaaagatatcgtgctggggacgatgtcgaaaaagaatatggaagaaaagctgggattataaaaaatcccggcttttttgcttatattgcccaaaaaatggtgaaaatgaaaacaagctggaggtgattcaacatgaaaaaagcgaaaaggcgaacatttgaagaacttgtctcggaaaataaaaaggagctcatgaccaaccaggagtttcttgatcggctggaagataagcttgaagagaaatttaagctgaagtgagtttttaaaaatcgattcatgtttacgctcctttttgagaatcctaatgctgaaaaggagggatagacatgccgagagaacacgacaaacagtctaaatttgccccgagccatcttgggacaaaaccggtagaatataagcgcaacaaaggaaaaaagatgcatgataaatcaggagaaacaccgatcattatgcagacaaaaggcgagtaaagatgaaaaggaggcagagacccgaatgacacatcaaaaacatcatccggatgacagatcagacaacgtagaaaagcttcaagacatggtgcagaacacaatcgaaaacattgaggagtctgaagagcagctgtcttttgccagcgaggcggaacaggaacagatccgcgaaaaaaatgaacgccgaaatgaaagcattgaggcgatgcgcaatgaaatccatgacgaggcggaagcccgcaaaaacggatatcatcaataaaccagggcgacctggtttttttgcatgaagcccgtccgtcgtgtttttgcccattgtatatgctagaattggattaaatacatttgtggaaaagggagtagaggggaaatttgtacgtctcaaaaaaagaaatagaagtccgctatgccgaaacagacccaaaatggggtgtcgtctatcacgccaattatttgattttgggatgggaggtaagcccggacggctttaattaaagaactcggcttttctttatgccgaaatgggagaaagacg

SEQ ID NO: 135 - protein, 78 aa, Bacillus licheniformis
MTHQKHHPDDRSDNVEKLQDMVQNTIENIEESEEQLSFASEAEQEQIREKNERRNESIEAMRNEIHDEAEARKNGYHQ

SEQ ID NO: 136 - DNA, 2407 bp, Bacillus licheniformis
  CDS (501)..(1907)
gcatactgtaaaaggccgggtgaatgaagagcttttgaaatcggtcgtgatagatccaaatggcgaattttatgtatgcggtccgctttcatttatgaaaagcgtgattgaaggattgcaaaaccttggcgtttcgatggaaaacatccgctatgagagctttgcttcatctcttgatatgcaaatagcgaactaacctcaagaaggcagctgtcaaaccgacagctgcctcagcgtgtcgacaaaccctcgcatgcgttgtcagtcctgcgcgtcggtgctcacgaattccaacattcgctccgctccgatgctcggccttcctagactgcaagggttttcaatcacgctgaaagaaggatgacaaaatcccaaaactaagagctgttttgggattttgtcagcaatctaaggcagctgtcaatccgacagctgcctttcatcttttcaaaacccggctcatacaataaagagaagtccaaccgggggggatttgagtattgagcatacgggagcaaaaagagctgcagcgggcgattgaagaaattacggaaatcgcggaaggattcggccttgatttttacccgatgagatatgagatttgtcctgctgaaattatttatacattcggtgcatacgggatgccgacaagatacagccattggagtttcggaaagcaatttcacaaaatgaagcttcactatgactttggcttgagcaaaatatatgagcttgtcattaattcagatccgtgttatgcgtttttgctggacagcaattcattgattcaaaataagctgattgtcgcacacgtccttgctcattgtgatttctttaaaaataactgccgttttcaaaatacgaagcgcgatatggttgaaagcatgtcggcgacagcagagcggattaaacattatgaaacggtacacggttcaaaagaagtcgaagcatttctcgatgcggtgctggcgattgaagaacacattgacccttcgctcgtgaggccgaagctgtcgtggagcgtagatgatgaagaggaagaagaaaccggcgcgccggccactccttatgacgacctctgggaactggatcataaaggatcgaaagagaagaagaaaaggacgaaaaaaaagtttccgccgaaaccggaaaaagacattctgctgttcatagaagagcattcgcgggagctggagccttggcagcgcgatattttaacgatgatgagagaggaaatgctgtatttctggccgcagcttgaaacgaaaatcatgaatgaaggctgggcgtcctattggcatcagcgaatcatccgtgagcttgatctgacatcaagtgaagcgatcgaattcgccaagctgaacgcgggagtggttcagccgtccaaaacgggaatcaatccttattatctcggattgaaaatatttgaggacatagaggagcgctacaacaacccgacagaagacatgaaaaagatgggggtagagccgaactctgggagagaaaaaatatttgaagtcagggagatcgaatcagacatttcatttatcaggaactatttaacgaaggatcttgtgatgcgggaagacctctacttgtttcaaaaacagggaagggattataaaatcgtcgacaaggattgggaggctgtgcgcgatcagcttgtcagcatgagagtcaacggaggatttccttatttgacagttgaggacggagattacttaaagaacaatgaattatacatcaagcattggtatgaagggatcgaactcgatttgaagtatcttgaaaaagttctgccttacctccaccagctatggggaagaagcgtgcatgtcgagaccgtgctcgaagataaacccgtcatgttttcctatgatggaaaggctgtccaccgcagatatttataaaggctgcattttggcagccttttttcttttaaagcgcaacgatttcaactcgtccgtcctttcaaaagaaatgccaaattaatgcacgtttgcccagttttacgacttcattataaaaatgtaaaataaagtatttaatgatatttctaaaattgtaattttagctgccggaaagcgtaaaaatgtagtatttaagttacctttgaaatgtaaatgaaatattatctacccttaaaaactttttttgaaaacgaataattaaggaatttgacatagtaagtcaagactatacctgatggaattccctccttataatagaagcagaggaagggctgaagcagccgttctcaaaaaaatgaaactgctaattttcgcctttgaaaatataaaatattctgctattgggaggacaacatgaaaaaacaagtaataacagcagcatcagcggttgttttaggatcgactttgtttgcgggagccgcttccgcgcaaaccat

SEQ ID NO: 137 - protein, 469 aa, Bacillus licheniformis
LSIREQKELQRAIEEITEIAEGFGLDFYPMRYEICPAEIIYTFGAYGMPTRYSHWSFGKQFHKMKLHYDFGLSKIYELVINSDPCYAFLLDSNSLIQNKLIVAHVLAHCDFFKNNCRFQNTKRDMVESMSATAERIKHYETVHGSKEVEAFLDAVLAIEEHIDPSLVRPKLSWSVDDEEEEETGAPATPYDDLWELDHKGSKEKKKRTKKKFPPKPEKDILLFIEEHSRELEPWQRDILTMMREEMLYFWPQLETKIMNEGWASYWHQRIIRELDLTSSEAIEFAKLNAGVVQPSKTGINPYYLGLKIFEDIEERYNNPTEDMKKMGVEPNSGREKIFEVREIESDISFIRNYLTKDLVMREDLYLFQKQGRDYKIVDKDWEAVRDQLVSMRVNGGFPYLTVEDGDYLKNNELYIKHWYEGIELDLKYLEKVLPYLHQLWGRSVHVETVLEDKPVMFSYDGKAVHRRYL

SEQ ID NO: 138 - DNA, 1291 bp, Bacillus licheniformis
  CDS (501)..(791)
ggaattgttgtcaacaatatgttttacagttcggggcaaattccgctgaccccgtcgggtgaaatggtgactggagacatcacagaacagacgcaccaggttttccgcaatttaaaagccgtgctgaaagaagcgggcgcctctctggagactgtcgtcaaagcaaccgtgtttctggcggatatgaatcaattcacagaggtgaatgaagtttacggacagtacttcgatacccacaaaccggcgagatcatgcgttgaggtggcgaggctgccgaaagacgcgcttgttgaaatagaagtcatcgcattagtgaaatagaaagaactcttaaaagatggttttggtctcaaaatcatcttttttgtttggaaaatttgtcaattcagtgtttttttatcccaatattacaaaaatatttttaattatgcaggaaaacaaaaaaagccgttgaatagttacactaatgtttttatattgggaaaaggtggtgaactactgtggaagttaccgacgtaagattacgccgcgtgaataccgatggtcgcatgagagcgattgcatccatcacgctggatcacgaatttgtagtgcatgatattcgtgtaattgatggaaacaatggtcttttcgttgcgatgccaagtaagcgtacacctgatggagaatttcgtgatatcgctcatccaatcaactcaagcacccgcggaaaaattcaggacgcggtgttaaatgaatatcatcgtttgggtgacgttgaggaaatagaatatgaagaaattggagcttcttaaaaaagaagggcttatggataagccctttttgttttgaaaaaaaatgatcttatcataataaaatgacaatatatggtttgtgtctgcgtataacagtagcaggaaggtaaagcatgcgaactcggataacaaagcgcatgcagaaggaatcaatccgtctccctgatcagttaatcctaaatatgctctaaacatccaaaatatgctgtcttgatttcccgatttctcattttggcttgcttgaaatcaactcatatttaggatatatttttctatggataatagggataatggaggccaatacatggataagcggtttgcagttgtgttagcagctggtcaaggaacaagaatgaaatcaaagctatataaagttcttcatcctgtttgcggaaaacctatggtcgagcatgttgtcgatgaagctcgcaagctatcattagaaaaacttgtcacaatagttggacatggtgcggaagatgtcaaaaaacagctcg

SEQ ID NO: 139 - protein, 97 aa, Bacillus licheniformis
VEVTDVRLRRVNTDGRMRAIASITLDHEFVVHDIRVIDGNNGLFVAMPSKRTPDGEFRDIAHPINSSTRGKIQDAVLNEYHRLGDVEEIEYEEIGAS

SEQ ID NO: 140 - DNA, 1694 bp, Bacillus licheniformis
  CDS (501)..(1451)
gctcgagggggatgcgctttcgtcaacccttaaaaacgcccgatatctgccggaatggctgaagctgcaaaaggaaattaaacaagagattgaaaaagcgatcaaatcgaatcagcgcgaaacgctgattgatgccatcaaccaaaaaattaaaaaatacaacctcacctgtccgaaccaattccaaaaaggccttgtttcagccaaaaacctcgaaagtcagctcaaatattggagctgatgccattccctgcacttattcataaaaataattgccaataacaatcatcttatgtaaaataaaggtaatatttatgcttttaaaaaggagaaaggatgaatgaagaagtggaagcgaaagcggcatacgaaaaagcggcctggctcctgaatcagtggtacaccatgatcaagcgccatgaagcgctccaggctgtatctttgaggtacgagatccaaaacctgctttctaaaatggagaaaagcggagatctggagctttgttttcagctgttggactatcgctgcaaattgatgatggagcagtttcagaatcagccgagcttttccggaaaattaaaaggcagaaggaaacggttaagagcgcggatgacatcattcagtactattttttctttttttcaggcatgtatgagttttatgagaaaaactattttgaggcgatcagctgttacaagaaagcggaagcgaagctgcataaactgaccgatgaaattgaaaaagcggaattttattataaaatcgcgaccgcctactaccaaatagacgatcatttcagatcgttgaactactccgaaaaagcgctctcacttttcagcaagcataaagaatacatagacaaaacgatcggatgcgaaatgatactcggatcggtgcagtttgaattgttccgcatcaaacaagctgaggagcactacgggcgggcgcttgatcaggccgttgcccttcaaaaccggcgaatcatcgggctgatctatcataatatgggactgaactatgccaaatgcggcatgccgcttttggcggaggagcactttagaaaagccctttcaatcggtgtccatgagcaatcggtttttggcattaacacccttttcgagctgtctcacctcatgtacaaaaacggttctcccgaagaagcgagacgtctctgcaaagagggatttaccagatcggccgaattaggagaggatgaatacgcagcgaagttcaggctgattttcgccctgtatgacgctggccatccgctcgatattgaattttcgcttgaatatatgagtgataaacggctatggccgcatgttgctgaactgacaaaagatattgccgactattacatgaagtcaggcgaccatgaaaaaagcgcgctttacctggaaaaatcgcagcatgcgaaaaatcaaatatataaaatgaaggaggggattatatgaaaaaaaacatttgttttttcgccgtcatgcttgtttgcctgatggggggaagcttcacagctgattctgcagcacaggacggatcgtttcagccattgggaaagtcggtgtttcctgccagcggacgatagagataacttgccgagatagaaatggcctcccgtcttttgctatcatcgtctcacctgaaggcaattgaagggagcagtagtgatgccgataaaagagatttcgcgctgc

SEQ ID NO: 141 - protein, 317 aa, Bacillus licheniformis
LFSAVGLSLQIDDGAVSESAELFRKIKRQKETVKSADDIIQYYFFFFSGMYEFYEKNYFEAISCYKKAEAKLHKLTDEIEKAEFYYKIATAYYQIDDHFRSLNYSEKALSLFSKHKEYIDKTIGCEMILGSVQFELFRIKQAEEHYGRALDQAVALQNRRIIGLIYHNMGLNYAKCGMPLLAEEHFRKALSIGVHEQSVFGINTLFELSHLMYKNGSPEEARRLCKEGFTRSAELGEDEYAAKFRLIFALYDAGHPLDIEFSLEYMSDKRLWPHVAELTKDIADYYMKSGDHEKSALYLEKSQHAKNQIYKMKEGII

SEQ ID NO: 142 - DNA, 1260 bp, Bacillus licheniformis
  CDS (501)..(1244)
attggcagacacacaggacttaaaatcctgcggtaggtgactaccgtgccggttcaagtccggccctcggcaccattgatcacacacatgccggtgtggcggaattggcagacgcgcacgactcaaaatcgtgttccttcgggagtgtcggttcgaccccgaccaccggtatcactaaacatcgtattgccaaacgatgaaagagcgttcctacaaaaggagcgctctttttatttattccttatcttggaacgaagccgtaagaattttttcttaaggactgcgagctccggaagctacgggaacataccgtgagatttatcgaaatgagcttaatacggtgcagaaacttttacaaaagcaaaaatatatctgatgatttattatctatttatagggcgaaaagtaaattattgatacaaacttctttgcaaagattggtaactttctgtaaaatgttctcatagcgatagaggcagtaaagtgtgggaggtttgacaatgaaagcagcagcctctgtgaacgtagccaatctcatcaatcagtggtatgttcacataaaaaagagagatgtttcaaatgccgtagaacttagggacagaataaaaggccttttaaacgtaatggaagaagatcaggatgttttgctttactttaatctacttgattacaggttcagagtattaatggaagacgtcgcgggggagccgcagcttccgcctattgctgaagataaggcgaagacagacggtttgttacgatactattactttctctttaaaggaatgtatgaaagtgcgaggagcaactactctaaagcgcttaattgttttagagttgccgagcggcagctcgataatgtcgaagatgaaatcgaaaaggccgagtttcattataagcttggaaatctctattattttacgaaaacaactctactttcttttcatcatctttcaatcgcgaagagcatttatagggcttatgaagaatataagacacagtcgataaactgtacggtgctgctcgcactcaattatatagacgacggacgtttaacaagagctgaaaatatgcttaagagttgcgcagaaagactgatcaagatgggcgataatcatctgctggcggctgtctactatgatctcggctttttaaaaattcaagaggataaacatgaagaagcactcgagtatttcgacctctcatttaaaacgggtgatatcgaaaaaaatgagccggggacttagctcgatagatgta

SEQ ID NO: 143 - protein, 248 aa, Bacillus licheniformis
MKAAASVNVANLINQWYVHIKKRDVSNAVELRDRIKGLLNVMEEDQDVLLYFNLLDYRFRVLMEDVAGEPQLPPIAEDKAKTDGLLRYYYFLFKGMYESARSNYSKALNCFRVAERQLDNVEDEIEKAEFHYKLGNLYYFTKTTLLSFHHLSIAKSIYRAYEEYKTQSINCTVLLALNYIDDGRLTRAENMLKSCAERLIKMGDNHLLAAVYYDLGFLKIQEDKHEEALEYFDLSFKTGDIEKNEPGT

SEQ ID NO: 144 - DNA, 2119 bp, Bacillus licheniformis
  CDS (501)..(1619)
tacgcagtcgaaatgaaccgtcttatcaagttcgagatggaagggtctattggttaacccttgatactaaagggggtgatcagacttcgatttgattgcacccgaataaactttatgtttgtgtaccgcagatataatctattgcctatcgattttctaaaaggcgtagaaatgtatctgcggttttttctttagctttttatttcataaaagaggtttgaattttgcttcctaacgattagttatgccaaattacatatcaacaggaaaatataatccttcatctgttctgccttccttcctatacttctaaaattcacccaaacacggaaaacgaatcatattgattaggccaaaaaacctctaacttataaagatttctgagaatgttgttgtgaaaaattattacttttatgtaaaatgatgactatgaataaaaagggaattgctattttgggtttttagaaaaattataatcttgcgagaaaggaagaggatatgtgagcgtgataccatatgatttggttgcgacgaaaatgaatttttggtatacagccttaaaaaacaattggacaggcaaggctgaggatactaagaaagaagttgaacgagaattagaacaaatggaacaaaatcaggatgtgattgtctattacaacttactgctcttccggcataatcttcaacttgattatatgtattctaaacccggtgtaaatttaaatagtcgttttgatgagttcaaaaagattcgcgatcagaataatctggaaggaatgttggattattattatcattttttcgctggaatgtatcatttcagacaaaaagaattaatccttgcgctgaatttttatagggatgccgagaaaaaactcgattcttttgattgtgatgaactggaaaaggctgaattttatttcaaggcatctgaagtgtattaccatatgaaacaaaccatcttttcgatgaattatgcaagtcgtgcgtataacttattcaaaaagtatgatacttacggtgagcgtcgagtacaaagtcagtttattattgcaggtaactggctagatcatatgtatcccgaaaaagctctacataatttaaataaagagcttaaagagtcagagacacaaggaattcttcatcttatgggttcatcacatttaaatatcggaatatgctacaataaattggaagatgtcgataaagcaacctacaattttcaaagagctctgaacctttataaagaggagaagcatagttttttgccaaaaacattattcaacctcgcacatgtcagggcaaagcaagggaagttgtcaataactgatgacctatactatgaaggcaaagagttggctgaaaagaacaagaatttagatatgcttgcaaagtttgatttaataaaagggctttatctttcatttgatctggatatggttcgcgaatcgttcaagtttttcgaaagtaaaggcaagtatgcagacatggaggaatacggtcttatagcggctgaactattagagaaaaaagaaaaaattcgagatgcagtggaattctaccggataacagttaatgcgagaagacaaattcaaaggagtgcttttctacatgtaaactaaatcgttctaggggtagttaaagcagcaggatttcttactataaaaaagaatttcccccagcattattaaaacctcaaattttgattacttgattattattttaagtaatcgcagaaagaaaggtcggtctatggcaagctatttaaaatccagaatcgtatcttatctgtttattcttttggaagtggggaccggattcgcaatttgcgaggtgtcaatggaaaatccgaattactcctcagcttgcgcggtctttatcataggttttacgattggggaatgcttcatgattagaaaatggtaaattttgatcatgacgggatactctttaccctcttctataaaagtgggacagacagttgaaaagccggtaaattcatagccttgtatttcaacagtaacttcttctatatgcgggtttcattttttcatctttgcttaatacattaaatcacctcctttatacagtatttgtccattaaagaagaacaggatct

SEQ ID NO: 145 - protein, 373 aa, Bacillus licheniformis
VSVIPYDLVATKMNFWYTALKNNWTGKAEDTKKEVERELEQMEQNQDVIVYYNLLLFRHNLQLDYMYSKPGVNLNSRFDEFKKIRDQNNLEGMLDYYYHFFAGMYHFRQKELILALNFYRDAEKKLDSFDCDELEKAEFYFKASEVYYHMKQTIFSMNYASRAYNLFKKYDTYGERRVQSQFIIAGNWLDHMYPEKALHNLNKELKESETQGILHLMGSSHLNIGICYNKLEDVDKATYNFQRALNLYKEEKHSFLPKTLFNLAHVRAKQGKLSITDDLYYEGKELAEKNKNLDMLAKFDLIKGLYLSFDLDMVRESFKFFESKGKYADMEEYGLIAAELLEKKEKIRDAVEFYRITVNARRQIQRSAFLHVN

SEQ ID NO: 146 - DNA, 1405 bp, Bacillus licheniformis
  CDS (501)..(905)
tgtagggaaagtgagttcatggctcttattagtgattgtcagctttctaatcgtagccacgttaaaacaggtgaaggggaaagattccactagagtggatgctggtcaatttttataactctttattttaaaagggtttcgaggagctgtggaagctgttgcaggcatcaataaaagatcaatattttctttaagttgatcattcacaaatcgaattacttctttattaggccaagtttcattttcatggatgcacagggtttatccgcaaattccttcaaatagtaaacccttcaagatcgcggtggacgaaatttcccttcgagaatactgcaggtgcggcttgaaaaagagcatatagagattcaggcgtcttagcaggcgtctttttgttgctgattttattgcggcataccgaaaattttttcacttttcaacctattatcacccgaattatagtaatatatttacaaaaatgaaataaaaaggtataggcggaagtgaaacagttaataccctcgtcaaaagtcggagtgaaaatccacgaatggtataaaatgataagagagtttagcgtaccggatgcagaggctttaaaagaagaagtagagaaggaaattaatcaaatggaagaagatcaggacttactcctttactatcagttgatgtgttttagacatcaattaatgttagaatatttagaacctactaacaaaagaaaacaaggacaatcaataaacaaattgttggcccaaatcgaggagcctcgaagagatttaaatggcctccttagttactactcatttttctttaggggcatgtatgaatttgagaaaaaacagtacatcaaagcaatagagttttatcgaaacgcagaaaaacagttggctctcattacgatgttatagaacaagccgagtttcactttaaaatggctgaagcatactacatcatgaaacagacacatgtatcatatattaagggcctttaaaatatacaataatcatgaactctacacagtccgtaaaatccaatgtttatttgttatcgcgggtaactatgacgatttaatgcgccatgacaaagccttaccccacctggaaaatgcacttgaattagcgatagagatcgacaataaaaggctcattagttctgcctattttaatatagccgactgtcatgaatgtatgggagacattgatgcagcagttgaatatgctgaaaaagccgtagagattaatctaaaagaagaatataacaacctaccacaatcattatattactctactcaacttctttttaagcagaaaaactacgagcgcgcaatcgagatatttcttattggttagacaaacagctcgaaaattcaacgataccctattcacttctctatttgaatatcttg

SEQ ID NO: 147 - protein, 135 aa, Bacillus licheniformis
VKQLIPSSKVGVKIHEWYKMIREFSVPDAEALKEEVEKEINQMEEDQDLLLYYQLMCFRHQLMLEYLEPTNKRKQGQSINKLLAQIEEPRRDLNGLLSYYSFFFRGMYEFEKKQYIKAIEFYRNAEKQLALITML

SEQ ID NO: 148 - DNA, 2104 bp, Bacillus licheniformis
  CDS (501)..(1604)
ggaaacgtcagtccctgtcggttctgtccaggatactttatagacgccttcagtcagcttgacgatatcggctttttgatcgcgaacccagcgtcccccaaccattccgctgtgaatgcggtaatcgatggtatggtcatttttaatgtagatttcatattcccatccgttttcatacgtatagatcatatggcttcctacaaactcttttacatcttgattcatatgaaccgctcctttatttgtttattgtaatcgaaacatgttgatatttacatatataattataaaatgccgtcaaaaaagatgtcaaacgaaaatacttcctgagagatttgcacaaataaagaagattgttacgattaatgtcagaattttgagttatcttaggaaattatgccaatatttagaaaagtgattgtcaaaaaataagcgattctgtaaaatgaaaaacaacccataaaaaggaaatgacatgggaagaaaggaaggataaacgattgaagacaaaaattgcgtatgaggaagttgcgggaatgcttaatcaatggtatgtcatgatcaagcgtcacgaagtatcacaagcggtctcgattaaatgcgacattgagcaccagctgccgaatatggaagaaaatcaagatctgcttctttattttaatcttttagactatcggcacaagctgctgacagaagagtttgccgcttccaacaaactgttcgaggatattcaggagcaaaaagccgatatgcaaagcacagatgacatgattgaatattattatttctttttcgctggcatgtacgaatttcataagaaggattatacaaatgcaatcaattattataaattagccgaggaaaagctcaggacaatccccgatcaaatcgaaatcgccgaattccattacaaactggctatcgcctactatcaaatcaaacaaaatttcctttccttaaaccatgcgaaaacagctctaaaaaccttcaaagcacatgatgattacattcaaaaagcgatcagcaacgatatgctgatcggggcaaataaactcgatttatttcgttttgatgaagccgaacagcattacaagcaagcccttaaagacgcggcactgatcaaacatcatgtcctcctcggcatggctcaccacaacttagggttgagctatgtcaatcgcaacctcctcacattggctgaacatcatttcaaagaagcgctgcttatcaaagagcatgaagaatcggtttacggcatccattccatgtttgaactgacacatgtgctgtacaaatcaaatgttgtcaaagaagcacgcaaattgtatgaaaaaggatttttccgtgcggaaaaagcaggagaaagggaatatttgtcgaaatttaaacttattcatgctctgtatgatgaacaggatccacttacggttgaacatgctttagaatatcttaaaacgatcaatctctggacggatgtagcggaattaacatttgatatcgcactttactataaagaaaatggagatgcagacaaagctgccgaatattttgaagaatctcatcatgcaagagaccaaattcttaaaagaacggaggagttaaagtgaaaaagatgattgccgttgcgttgactgccgtctttgcaagccttgtcgttttaagtttttcgtctcagccgaagggagatgccgagtttgccggccgagccatttttcttgacgataagccggctcagctgatggcgggcagagcgatctttctcgacagctttgacggaaattcgccagccgcctgacaaaacaccgcataaccctgcttgtcaccggacaagctctcttcgaaaagcgccgccagcggcgctttttttatgaaagcaaatataaccggcgtccctgcaaatcgcttgcgaagattaaaaatatgaaacacatgacaggaatggcgctcaccggcttttggtcgaatcctattgaaaaatctgcccgatttatagtgcttgtcattctataaatccttataatggtcttaacgccaatgtgaggcatgccaatagacagattgcaggggaaattctatactgaacagcgcaatttagcatgtaatc

SEQ ID NO: 149 - protein, 368 aa, Bacillus licheniformis
LKTKIAYEEVAGMLNQWYVMIKRHEVSQAVSIKCDIEHQLPNMEENQDLLLYFNLLDYRHKLLTEEFAASNKLFEDIQEQKADMQSTDDMIEYYYFFFAGMYEFHKKDYTNAINYYKLAEEKLRTIPDQIEIAEFHYKLAIAYYQIKQNFLSLNHAKTALKTFKAHDDYIQKAISNDMLIGANKLDLFRFDEAEQHYKQALKDAALIKHHVLLGMAHHNLGLSYVNRNLLTLAEHHFKEALLIKEHEESVYGIHSMFELTHVLYKSNVVKEARKLYEKGFFRAEKAGEREYLSKFKLIHALYDEQDPLTVEHALEYLKTINLWTDVAELTFDIALYYKENGDADKAAEYFEESHHARDQILKRTEELK

SEQ ID NO: 150 - DNA, 1381 bp, Bacillus licheniformis
  CDS (501)..(881)
atttacaaaaatgaaataaaaaggtataggcggaagtgaaacagttaataccctcgtcaaaagtcggagtgaaaatccacgaatggtataaaatgataagagagtttagcgtaccggatgcagaggctttaaaagaagaagtagagaaggaaattaatcaaatggaagaagatcaggacttactcctttactatcagttgatgtgttttagacatcaattaatgttagaatatttagaacctactaacaaaagaaaacaaggacaatcaataaacaaattgttggcccaaatcgaggagcctcgaagagatttaaatggcctccttagttactactcatttttctttaggggcatgtatgaatttgagaaaaaacagtacatcaaagcaatagagttttatcgaaacgcagaaaaacagttggctctcattacgatgttatagaacaagccgagtttcactttaaaatggctgaagcatactacatcatgaaacagacacatgtatcatatattaagggcctttaaaatatacaataatcatgaactctacacagtccgtaaaatccaatgtttatttgttatcgcgggtaactatgacgatttaatgcgccatgacaaagccttaccccacctggaaaatgcacttgaattagcgatagagatcgacaataaaaggctcattagttctgcctattttaatatagccgactgtcatgaatgtatgggagacattgatgcagcagttgaatatgctgaaaaagccgtagagattaatctaaaagaagaatataacaacctaccacaatcattatattactctactcaacttctttttaagcagaaaaactacgagcgcgcaatcgagatatttcttattggttagacaaacagctcgaaaattcaacgataccctattcacttctctatttgaatatcttgaggcgttatatatctattctgtgaataaagaagagattttagaggtatttaaatacttggaggagaataaaatatttgcatacatagaagagctttcgcttgaagtctctaaccaataccttgaaagaaaagaccatagaaactcaatcgagttccttcaaaaaatgatgtatgggcaaacaaaaattaaaaaaggggagtgtctctatgagtattaaaaagctcgttattcccattttagccgccgcgttattaacgatgggtattagcgttgtttcagcaaccgaccagtctgacggcgtatatcaaatcgctacccgtaagcaaacgtaagaaacgccccaaatgtggggcgctttttatttctacggtttcttaacgttaaacatcgtgattaacttcttatcagctgtcggtaagattaacgtataccattccgac

SEQ ID NO: 151 - protein, 127 aa, Bacillus licheniformis
MYHILRAFKIYNNHELYTVRKIQCLFVIAGNYDDLMRHDKALPHLENALELAIEIDNKRLISSAYFNIADCHECMGDIDAAVEYAEKAVEINLKEEYNNLPQSLYYSTQLLFKQKNYERAIEIFLIG

SEQ ID NO: 152 - DNA, 1735 bp, Bacillus licheniformis
  CDS (501)..(1235)
ggcttgttcccgacggaggcggacacttctttttagagcggagaatcggtgaaactgcggccaaagaattgatttggagcgggaaaaaattgacgggggccgaagcgcacgagcttcggatcgcagacgccgtattcagcggggactccggccgttttgcgcgcatctatcttgaaaagcttctgcacgctccgctggcagcgatgattgagacaaaaaagatctatcaggcgttgaatggaggcaggctgcagaaaacgcttgaactcgagaaaacggcccagatgaaaatgaggctgacaagcgaccatcaggaagggatccgcgcatttttagaaaagcgccagccgcaatttaaccgtcagcaagtataacaagagcggtccggcaggaaattgaccttgggaaatgatgtgcagaaacaattgtaaaaaaatttaagtttccataaaatgattcataagatacagatctgtacgaagtcttgggaggcggcgaaattgaaacagaagattccatctgaatacgttgctagaaagctgaatgattggtacaacgccattcggaaaaatcagatcgccgccagtgaatcattgaaagcggaaattttaaatgattttcaagacatggaagaaaatcgggacgtcctgctctactattcgctgcttgaattcaggcataaactgatgctcagctatttgaaaccgaaagagactgaaaatattgaaaaaaacctccgcgacttagaagaaaaagaagaccaaatgacgggtttattaaactattattactggttttttaaagggatgtatgagttcaaacaaaagcggttcgtcaaagcaatcggctgctataaaacggctgaacaaaaagtcagcgcactggaagacgaggttgaaaaagcggaattttattataagcttgcggaaatctactattatatcaaccagagatacctgtcgatcaactatgcgacgctagcttccgacatttttaaccggtatgaaacgctaaaagaaaaaaagattttctgcgattttatcattgccggtaattgggttgaatcgatgacatacggacccgcgctgaaaagcctggccaatgcgcttgaagacgccaggaaaatcaaaaacagccatttgacggcagccgctcattttaatttgggaaattgctatttccaccaagaatcgtaccgggaagcctcagatcatatggagcgccctttccatttttgaacaggaaagttcatcatatattcccaaagtgctgtacaacttgatgtacgtccgtctcaagcaggggaaccatgccggagctgccgcctgttatgaaaaaggcatccgaagcgcggcatcgctcggggatgaagaacacgcggcaaagcttaacattctgtgcgggctgtatttagacggaggggatcagaaagccgtggaaaacggatttgattatttggagtcaaatcatttatatgctgctgttgaagagctggctttagatgcagcccagtattataatcaaattgagcggctgaaagattccattttttactatgaaaagtgcgctcaggcaagtcgaaaaatcaaaaggggagatgcgttgtatgaaagctaaactgttgttcgtcgcggtgtcgctggctgttgtgttaacgtcttcaagctttttggcagatgcggggaaagccccttccttgtatgcggacaaaatgatcacgactgacaaggaggct

SEQ ID NO: 153 - protein, 245 aa, Bacillus licheniformis
LKQKIPSEYVARKLNDWYNAIRKNQIAASESLKAEILNDFQDMEENRDVLLYYSLLEFRHKLMLSYLKPKETENIEKNLRDLEEKEDQMTGLLNYYYWFFKGMYEFKQKRFVKAIGCYKTAEQKVSALEDEVEKAEFYYKLAEIYYYINQRYLSINYATLASDIFNRYETLKEKKIFCDFIIAGNWVESMTYGPALKSLANALEDARKIKNSHLTAAAHFNLGNCYFHQESYREASDHMERPFHF

SEQ ID NO: 154 - DNA, 2116 bp, Bacillus licheniformis
  CDS (501)..(1616)
attcctcgtaaaaggcgcggatcgcgtcgccgccttttccctttaaagcatcatcaagtgatgtgatgccctcaacagcctttttgactttggcgatttcgtctgattgttgttttaattgttccagcgtttgatctattgcattgtgcagcgcctgaacatcaagagtcttcatggcattctcctctaatccttttcattacaatcagtatatagtttaccactttatagaaagtacttggtgaatatatcctgttcaaccatgaaaatgaatcattgggcttaggtcattatttctattgattcatttcgattaccgtaaacaagtttgttgtagcattctttaggctctgtgactaaaccaaaaagccatttgttttaaattggtctttcggtatcacgaaaatttcgttttttgggctgatagaagttttgcaattatgaattgtatgttaatctttaacataaaaaggatgttagctggaagggaatgatggcagttggagactatcccgtcttcagaagttggaatcaaaataaaccgctggtacaacgaaattcaaaaattaaacgtaatagaagcagaacgattaaaggcggaagttcacttagctatagaaagaatggaagaagatcaggacttgctttcctattatcagcttatgaattttagacatgagttaatgttggaatatcttttcccggcagaaaaaaagctgagcaaatctgattatcttagggaaattgagggacagggaagaaaattgtcaggcttgctcgaatactatttttcctttttcaccggaatgtatcatttttctcgcggaaaatacataaaggcaatcaaggcatatagagcagcagaaaaaaagttgacgaaagtttcagataaaatagaaaaggctgaattctattataagatggcggaagtgttttatcatatgaaacagactcatatgtcaatgtattatgtgtctctcgcttatgatatttataaatcctatgatgcatatgtgattcgaagaattaattgtctattcgttgttgctgggaattacattgatttatcaacccatgatcaagctttaccgcatcttttaagcgctaaggaatccgcggaagacattcaaaacaaggcgatcgttgcaaaggctcttttaaatgtagcatattgttataatgcaatggagagaccaacaaaagctattgaatactttcataaggcgattgatgtagcaaaggaaataaaggcaaaagaactgactcaggcttattatgatttggcattaattcactttcgaaataacgaaaatattgaaggacgaaaattttatgaaaaggcgcttgaaagtgcgcgggtatttgaagatgaattattcctgtgtctgttggatgttttagaggcactgtttataaaatcagctaataagtcagaggtactagaaacaatgaaaccattacgggatagtcgtggttacccctatcttgaggaactggcattagaagcagctctattctatactaggaatgagcggccaaatgattccatatttttttatgatcagatggtgcaggctcagaaacaaatcaaaaggggcgactttctgtatgaaatctaagctgtttctttcgctgacccttgctttgggcttgttggtcgtgtcgagcgcttccattcacacatctgttgaacaacaacatgcagaattttctgtagcatctaggctcgcaacataattgtgtttgggcaggtcatgtgatggcctgcctttttggtgaaagaattattttagtttgaaaaccagaacgattgtgttaatactcatctttcttcgtcccttgtgttggaattttcatcatatcaatatttgaatatgcggctgtccgcattattaacaattttaaattttttgcacaaattttatacaaaggcagacaaaaaccttgatatatcaatggttctatgggtatattcaaccacgaccaccgatatcgctaaaaaccgtattgccaaacgacgaaagagcgttccttacacaaggaatgctctttttgtttattcctcatcaaagcggagagccgccaacataaacgcaatgaccaactgttgtccgca

SEQ ID NO: 155 - protein, 372 aa, Bacillus licheniformis; identical to SEQ ID NO: 32

SEQ ID NO: 156 - DNA, 1576 bp, Bacillus licheniformis
  CDS (501)..(1268)
cggagcctccattccaaaacgagtactgggacctgcatgaagacgggatctatgtcgatatcgtttcagggaagccgctgttttcatcgcttgacaaatttgacgcacactgcggctggccaagcttcacaaaaccggtcgatgccggagaaatcgaagaaaagctggacacttcacacggcatgattcggactgaggtgagaagcaagtctgccgattcccatcttggacacgtgtttccggacggacccggaccggacggcctgcgctattgcatcaattcagccgccctccggtttgtgccgaaggacgaccttgagaaagaaggatacggcgaatatgtcaaactgtttgaacgcaagaaatccggagaggaaagctgaggagagcagcatgcaagatgatccttttttcaaagggtcatctttttttagaggattttctgctctgaaagcgaaaaaacattacaatagatcatcttgagaaaagaggcagccgttgtgacatccatttcaaacacagaagaccgttatttaatgctgacatgcagcaaaaaaattgaatcccattatcatatatacacagatgaggagatcccgcagatgttttcctctcattttctgcagctgcaggacgattttccgctgacagagctgtactccctgctcgttcggacacccgaaattttaaaacgaaattatgttcatgtgaaaagctcttataagcgggatctgccttttacgatgaaaaagtcgctctttgatcttggctatattcttgatgaagaattgttttattccatcaggcttgcagattggaaaggagattcccctggtgtacgggcagagtgggggacggagaaatcgctcattgacggctgccgcatgatgcaggcttatgatacattgtctatcaatgaagcgtttgcgaaggaaaagctgctgcgcaagtatcctttttatgaggaaggcatcattcagctgtgtgtctgctactcggaagaaggcgaaccgattggatgtgctgagctttatctcgatcacgacgaaaacgttgctaaaatcgaagaagtcgccattttggagccataccagcggaaaggctatggatcgggccttatcaagcagatgctcaccgccgccaaacaatcgggcatggaatcgtgctatcttgtaacttcgggaagcgatcaggtgaaaacgttttatgaaaagctgggctttcagcagaaggaaaagctcacgacaatatttaaatatttgttcgtataaagtaggcaggtgcacataccaattgggacttggcctgcataggctggggtgtagactttatacgaaaggatgataagcctgtgcattactcccattattgctgtcctactggaggatacggctacgggtttcacggaagaacacatttgactcatcgttgtcctctttattttgctcatcattgtcggtgcggctttcatttgctagctaaaagcccgacgcccggcgcttgacatgctcacaaagccttcctccggaaggttttttttggtttttgttggaaaattttgcattcgtatgtaata

SEQ ID NO: 157 - protein, 256 aa, Bacillus licheniformis
VTSISNTEDRYLMLTCSKKIESHYHIYTDEEIPQMFSSHFLQLQDDFPLTELYSLLVRTPEILKRNYVHVKSSYKRDLPFTMKKSLFDLGYILDEELFYSIRLADWKGDSPGVRAEWGTEKSLIDGCRMMQAYDTLSINEAFAKEKLLRKYPFYEEGIIQLCVCYSEEGEPIGCAELYLDHDENVAKIEEVAILEPYQRKGYGSGLIKQMLTAAKQSGMESCYLVTSGSDQVKTFYEKLGFQQKEKLTTIFKYLFV

SEQ ID NO: 158 - DNA, 1783 bp, Bacillus licheniformis
  CDS (501)..(1283)
cctgccaaaaagccgttaaacaagcaaaaacgcctgacccgttagggaggcggttattttttgagtttctttttcactttttcgatcagctcgtcttcatcaggagctgacagcggacgattattgacaaacgcaaacgatttttttcgtcccggcccgcagtaagactggcagccgatttccacttttgcatccggatcaatttctttcagacggggcaaaagcgtctttaaattggtggcctggcaatcgtcgcatactcgaaattcattagccatttcatacgcttcctttcgttttgttcatctgtctttatgaaaggcattcaactgtgccgaacttttataaaaaatgacaccatccttcattttacaaggattctttcattcctgcaaggatcgcgctaaaaaaatcagttcctattcttttagcaaacttgtataaatattttccaaaatggacaatctaataccaatactgacaatgggagttgagaagtgatgaaacaaagacaagacgcttggtctgaggaaaatgatttactgcttgctgaaacggtattgcggcatgtcagggaagggagcacacagctgaacgccttcgaggaagtcggagacagactgaacaggacatcagccgcctgcggttttagatggaacgcagttgtccgccaccaatacgaaaaagcattgcagctggctaaaaaacagaggaagcaaagaatgcgcgccctcggaaacggacagccggcgaaaaaacgcttattatacaagccgccggtcgaaacgaatgctgaacctcctgcagaaagcgttgttgagcagaagaaagcaaccgcagattcaagcgaacagcagccgatcgccagcgagcatctgccttatgttgatgagagctttaaagaagagttagctagtttatctcaccttctatcgccaaatcagccgcaggccggccatacagccgatacatcgaaagacatgacgatcgatgatgtgatccgcttcctgcaaaactatacaggaaacgaagaacaaactgccgctttaaaaatggaaaatgaacgtttaaaacaggaaaacgaagaactgacgaagaaagttgaaaagcttgaagcggaagtcaaaaagctggaaaaagaccagacaaccatccaggaagactacgaaacgctcgtaaaaattatgaaccgtgcaagaaaactagttttattcgaagaagacgaacacgctgcgcccgccttcaaaatggaccggaacggcaatttagaaaaaatggctgaatagcgctctcagaggatgcggcagagacgttcaggcagcaaggactgacaatgcatacaaacatttttcgatacgaggatacccctttctttaaaaaagggggtatttttacctttctgcggcttgcttttatatgacaaaaatttcataatagggatagcaattcataaggcggggtattcgatgaagtttgttttatatgcggttcagttcggcactgcggcccttttgtttttgttttctgcattggcaagctggtatcaaggcagcgagcttttaaaggtgccgtgggagtggaaatatacagccaagtttacaagttggctgtacggagaggactccattaaaaacgcacataatatttcacagcttgattttttcgtctatgcggccaagcatacgccggcaaccgttattttaatggccgtcagtttggcgtatatcatcgctttggcggcttatcttctcatcaaaacatatgtaaaacgaaaaagcgcttc

SEQ ID NO: 159 - protein, 261 aa, Bacillus licheniformis
MKQRQDAWSEENDLLLAETVLRHVREGSTQLNAFEEVGDRLNRTSAACGFRWNAVVRHQYEKALQLAKKQRKQRMRALGNGQPAKKRLLYKPPVETNAEPPAESVVEQKKATADSSEQQPIASEHLPYVDESFKEELASLSHLLSPNQPQAGHTADTSKDMTIDDVIRFLQNYTGNEEQTAALKMENERLKQENEELTKKVEKLEAEVKKLEKDQTTIQEDYETLVKIMNRARKLVLFEEDEHAAPAFKMDRNGNLEKMAE

SEQ ID NO: 160 - DNA, 2311 bp, Bacillus licheniformis
  CDS (501)..(1811)
tgatgtcttcccattcattttcaaggctgcatagcataacgccgtcgacttctttcctcttgagcagctccagtactttcagttcattctgcttttgataaaacgtctgaaacacaatgactttgtattggtgtttcagcgcttcagcggacatatgcttcataagctgagcgaagaaggggtggtccgcgtgtgggacagacactgcgagaaacatcgttttgttggatctgagctttcgtgcagacgtgttcgggatgtagtccaatttttcgatgacttccaaaacccgcttccttttttcttcagatacatagggatgatcgttcagtactcttgaaacagttgtttttgacacattacttaattttgcaatttcgtcaatcgtaggcataaagtcacttcctgaaaaaaagagttgttatggtatcgattccatcatttaagatatgtcatgaaatatgacaatttcccaaaataataaaaatggggtgaaattgatgaaaaccgcaaacgaaaacatgacttgcacgagcaaacagctatttgtccttctgaatgatttgaaggaaggaaagctcgctggtgaatgccgtatagacgacacactggccaatcaaaaattaaaagagacattgcagcaggatcaattcgacataaccgccaatttgctgaacagaatggattccccgccctccagagttgactttatgccgcttcatcgactgatcacagaagaagaagtagatgacgtggttcatgcggtgaaagacgtgctgccgaccgggcaatttacaagcggtttttatgttggcgtatttgaagctgaaatagctgcttttttgagcaaaaagcatgtcatggcttcatccagcggaaccgatgccatgattgtcgcgctgaaggctgcgggtgttggacaaggtgatgaagtcattatgcctgcaaacagctttgctgcaacggaaaacgccgtgctcgcagctggaggcactccgattttctgcgatattgaccctgttacattttgcatggatccttcagaaattgaagcatgtgtcactttgaaaacgaaatgcattttgcctgtacacctttatggaaagctgcctgacatggaagccattgcaaaaaccgctgataaatacggcatcccgattattgaagacgcctgccaggcgatcggcgtttccgatctgggaaaaaacagcctttgctccatattaagcttcaatccgtataaaaatctcggcacttgcggaaaagccggcgcaattgtgacggatgatccatcatttgcatccgcatgcatggaatatatgtatcacggctttgaactgaatcaaaaaaataaaaaggcggctgactacggctttaacgctaagattgataatctgcaagccgctattggactggcaaggatgaaatatctttctttaaataatctgaagcgcttatatttagcagatcgttatattgcgcatttgcagcagtatgaagacagaggtctgatcaaattgcctcaaatgaccgatgatcatgtatggcatttgtttacaattaaaatactaaacggaaatcgtgaccaagtcaaagatatgatgcttaaatttcataatgtccaaacagatatatactacccgattttatcccatcatcaaaacacaccacttgtaaaagccaattatcggcacacatcactgccggtcactgaatcagtgcataaacaaatgcttcagcttcctctctatccggggctcaccgtagaagaacaagacaaagtaatggaggccttaattgatgtcgtatcatgaaacactttcttttcacaccttgcagcaagtaaacaagccgaagtacgccgtattttgcgattttgatgagacatatttcgcccacagcatcaccgatgaatcgagaaaagcgctcatggaccttgaaacatttattcattcgcaccatcttgatcacaagattttgctcggctgggtgaccgggagcagcctgtcatccgttcttgcaaaaatgaagcggggaggctttcgatatcttccgcattttgtcgccggtgaccttggcactgaaatcacttatttctctgaagaaggccaagtctctgataaagattgggaagcccgattgcaagaatcaaatttctcccatgatctggtcgaagaaatcaagcagactctctctaaaaaatatgagattgcgcttgtgcctcagactcagcatggcttttcccgctataaaatcaactattactataaatcgttggaagagagcatagataagagggcgcttgaagcca

SEQ ID NO: 161 - protein, 437 aa, Bacillus licheniformis
MKTANENMTCTSKQLFVLLNDLKEGKLAGECRIDDTLANQKLKETLQQDQFDITANLLNRMDSPPSRVDFMPLHRLITEEEVDDVVHAVKDVLPTGQFTSGFYVGVFEAEIAAFLSKKHVMASSSGTDAMIVALKAAGVGQGDEVIMPANSFAATENAVLAAGGTPIFCDIDPVTFCMDPSEIEACVTLKTKCILPVHLYGKLPDMEAIAKTADKYGIPIIEDACQAIGVSDLGKNSLCSILSFNPYKNLGTCGKAGAIVTDDPSFASACMEYMYHGFELNQKNKKAADYGFNAKIDNLQAAIGLARMKYLSLNNLKRLYLADRYIAHLQQYEDRGLIKLPQMTDDHVWHLFTIKILNGNRDQVKDMMLKFHNVQTDIYYPILSHHQNTPLVKANYRHTSLPVTESVHKQMLQLPLYPGLTVEEQDKVMEALIDVVS

SEQ ID NO: 162 - DNA, 2143 bp, Bacillus licheniformis
  CDS (501)..(1643)
gctgccgcagaagaacttgcgcggcttcatccggacgcgaagttcgtcctggctgtcggccaaaacagcatcagacagcagctgtatgaacgcattggtcttccgcttgaccggtatgcggttttgattcatccctctgctgttgtcagcggttcggcccggattcaaaacggcgccgttgttatggcatcgagcgtcatccaagcggatgcagacgtcggcatccacgcgattgtcaacacaggtgcgatcgtcgaacacgacaatcggatcggcgattacgttcatctttcgcccggaacggtgttaaccggcggcgtgacagttatggaaggcgctcatctcggcgcgggaacggcggtcattcccggaaagacagtcggacgctggagcgtgacgggagcgggggcagccgtgattcacgacattcctgataattgcaccgcagtcggagtccctgcaagaatgatcaaataacagcagtaaaaagggtgaaaaacatgagtcagaataagcgaatttatttatcaccgccgcacatgagcggagacgaggagcgctatgtagccgaagcgtttcggacaaactggatcgcgcccctcggtccccttgtcgacacatttgaagaaaagcttgccgcctatgcggggacgtccggagccgcggcagtcagctcaggaacagctgcgatccacctggccttgaaattgctcggcgtcggcaaaggcgatacggtcttctgctcttcttttacgtttgtagcgagcgccaatccgatcatatatgagcaggctgaaccggttttcattgattctgaacgggatacatggaacatgtcgcccgaggcgcttgaacgggcgcttgacgaagcggagcgggccaggaatctcccgaaagccgtcatcgtcgtcaacttgtacggccaaagcgcgaaaatggacgagattatggccatttgcgatcgatttgccgtgcctgtcattgaagatgcagccgaatcgctcggttctgtttataaaggcagaaaaagcgggaccttcggacgcttcggcatttattcgttcaacggtaacaaaatcatcaccacatcgggcggaggaatgctggtcagcgatgatgaagacgcgttgaagaaggcgcgctttttagccactcaggcgcgcgagccagccattcattatcagcacgaaaaagcgggctacaattaccggatgagcaatgttctggccggaatcggcatcgcacagctcgccgttctggatgaccgggtacatgccagacgggcggttttcgagcgctataaggaggcgctttccggtatcgaaggtatagaattcatgcctgaggccggcatgtcaaaccgctggctcacgacattaacgttagacacagcaaagattcaaacaacaccggcggacatcatcgaacagctcgcaaatgaaaacattgaggcccgcccgttatggaagcctttgcacagacagcccctttttaaaggcgcggccttttatccgcacgatgaccagggctctgtctgctgcgacttatttcagcgcgggctctgcctgccgtcaggatcaagtatgacgcgaaaagagcaggaccgggtaattcaaatcgttgccgaccggattaaatataaatgaggtgctaaacatggcgattacatattccatggacagcttaaagcataagctggcagaaattttggatgtcattccaaggcattcatcagtcgtttacttggactacccgctatacggaaacgtcggggatctattgatcatgaaaggaacggaagctttttttgaagcatacggcatcaaggtgcgcgaaagatggaatgcggagaatttcattccgggccgccgcattccaaaggacgccatcattgtttgtcaggggggcggcaatttcggcgacttgtaccctcacttccagcagttcagagaacgggtggtcgaacattacccggacaaccggatcgtcattctgccgcagtcgatttattatgagcatgaagaaaatataataaaaacgcgcggcattttggcggctcacccggatctgcacttattcacgcgggaaaaggcatcattcgattttgccgtcaagcgtttcgaagaggtgaaaaacatcaaaa

SEQ ID NO: 163 - protein, 381 aa, Bacillus licheniformis
MSQNKRIYLSPPHMSGDEERYVAEAFRTNWIAPLGPLVDTFEEKLAAYAGTSGAAAVSSGTAAIHLALKLLGVGKGDTVFCSSFTFVASANPIIYEQAEPVFIDSERDTWNMSPEALERALDEAERARNLPKAVIVVNLYGQSAKMDEIMAICDRFAVPVIEDAAESLGSVYKGRKSGTFGRFGIYSFNGNKIITTSGGGMLVSDDEDALKKARFLATQAREPAIHYQHEKAGYNYRMSNVLAGIGIAQLAVLDDRVHARRAVFERYKEALSGIEGIEFMPEAGMSNRWLTTLTLDTAKIQTTPADIIEQLANENIEARPLWKPLHRQPLFKGAAFYPHDDQGSVCCDLFQRGLCLPSGSSMTRKEQDRVIQIVADRIKYK

SEQ ID NO: 164 - DNA, 2107 bp, Bacillus licheniformis
  CDS (501)..(1607)
gactgccaccgctttctcggcgacatggacaatgagctgagatctctgttccagtcatttgaattttctaaaacgcctcgtgccgaaacatgctcaagaatcggctataactttcagcggaggcgggaatacaaggccgctatctactggtatgagctggccacaacattggtgcctgattcaaataaatggagcttcacctatccggcatactatacttggtaccctcatttgcaaatgtgtgtgtgctattacaatttaggagactttgaaaagtcgtatcatcataatgaagaggcgaggaaataccgtcccgaagacaaatccgtccttcataacaaacagctgctggaagggaaattaggcattaacaattagcattgtaaagacttactgaacaagtaggtcttttttttatgaataaaatcaagccgtgccaatttagcggcaggcatcataacttattttggaactttttgaatttagaggaggaacaaaggatgatcccgttagtcaatttaaaacgtcaatttcaaacagtaaaacaggatattttaaaagagtttgaacatgtgctggacagcggccaatatatattggggccaaaggttgaagaattagagaaaagaatagctgaaaagcttggtgtaaaagaagcggtcgcggtcgccaacggaacggatgcattggtgctgacgcttgaagctttcggcatcggcaaaggggatgaagtgattacgaccccgttcacttttttcgccaccgccgaagccgtctcaagggtgggggctgaacctgtgtttgctgatgtcgatcctgaaacatacaatcttgatccgaaaaaaatagaagaaaagatcacccctgctactaaagcgatcattcccgtccatatcttcggacagccggctgatatggacgagatcatggagcttgccaaaaaacacggactgcttgtgattgaggatgcctgccaagcgttcggcgcatcgtataaagagcggcctgtcggcagcatcggggatgccgcctgtttttcatttttccctacaaaaaacttgggaacattgggagacgggggaatggtgacgatttcagacccggatgcagcccggcaattaagaacactcagaacccatggcactagcaaaaaatacttccatgacaaaatcggtttcaacagccgtcttgatgaattacacgccgcagctttactcattcttcttgagaaaatcgacggctggaatgaacaaagaagaagagtggccagccgctacagagaaggtttgaaaacggcggagcacctcacactgccggcagagaaagaggaccgcacacatatctatcatctctattgtatcggcgcgaaaaaccgcgactacatcatacaatcgctgaaagagcaggacattcattcaggtgtgtattatccttgctgccttcatctgcaatcggtctattcttcactgcagtacaaaaaaggcgattttcctatagccgagtccttgtccgaaacccttttcgccattccgatggatccttttctagccgccgaggaacaagatcagattatttctgcgctgctgaaaaaaggaggaggggaaaagtgacggttcattttggtttaatcggctgcggctatatgtcaagaaaacatcttcaagcactggccgagtgcgatgatgcaaagttgtcggccgtcagtgatttgcaggaagaaagaatgaaggaagcggaagaatactatgcttccctcgccggtgaggaaagccgaatgacccgctatccgcagtatcaagcgctgctttcagatcctaaaattgaagcggtcattattgcggcggtttcgggactgcacgccgaaatggccaaacatgcgctgctggcaggcaagcacgtcatcgtcgaaaaaccgatgaccttgtcattacgggatgccgatgagcttatagaactggcggagcagaacgggctgaagctcatggtctgccaccagatgcgccaccggccgatcatgaaaaaactgaaggaaacgattgaggaaggaaagctgggaaagatctacttgggcacggtatcgctccgcttaaacaggtcccccgcttat

SEQ ID NO: 165 - protein, 369 aa, Bacillus licheniformis; identical to SEQ ID NO: 101

SEQ ID NO: 166 - DNA, 2092 bp, Bacillus licheniformis
  CDS (501)..(1592)
ctttcccagcttgggggctgtggcgaaaatgtcgttatcgaagacggggtccgcatttttcatccggaaaacatctatatcggagataacgtttatatcggccatgacacgattttaaaaggctattataagcatgacctgatcatcggttcaaacagctggatcgggcagcaatgttttatacacggtgccggcggggttacaatcggagaatttgcaggaattggtccgaacgtccggatacatgccgcttaccataccgatcctgataaacccgacagtaccattttgttttcgccgcttacattcgctcctattcatattgaagaaaactgcaacatcgggatcggtgcgtctatcctagcaggcgttacgataggcgcccactccaaaatcggagcaaatgccgtcgtcaatcgcaatattcccccgtacagcatagcagtaggcgtgccggcaaaggtgattaaaaaccgaagaatgaaagatgaggatctctcatgatcagattgatcgagccgtatattacatttgaagaagtgcaagcagaattaaaggagatattttcctctggcatgctgacaaaaggcccttatgtcagaacatttgctgatcatatgagacagtatgtcagtgcaaagcatgcttttttaacaacatcggcaacaacggctttatcgatgtgccttaaaagcctgaacgtgcaacccggagatgaagtaatcgtctcagacttctcgttccccgccactgtcaatgtaatagaagatttaggagccaagccggtttttgccgatgttgatcttgaaacatttaacatgcttccagaagaactggaaagtcaaatcacgtcccgtacaaaagccgttctttttgtagatgctcttggaaacccgacaggcatcaccaacattaagcaaatttgtaaggagtacggcttaccccttgtggatgatgccgcttgtgcgatcggcagcagcgaatacggctgtaaatccggaaaaattgccgatctcacctgtttcagctttcacccaagaaagctgcttacgacaggcgaaggcggggcaattacaaccgaccgggaagagttgaaagactggctttcggtcaaattaaaccatggcgctgccatctctgacggaaaattggattttatagatttcggctacaactacagattatccgatatccaagccgctcttggaattaaacagctccaaaaacttgatgacatcattcatcggagaaaccttcagcagaaagcatatagtgaacagcttgaacccctcggattccaaagtcaaaaaatcggtccagccgttgtacacaacatacaatccgccgttttcaaagttccaaaaaacatcgttcgcgacgaattgattcaatatttgagcgactgccatatagagtcgactttcggcacttattgtttaagcggcactccctattaccgccggaaataccaacagctaaaatcgaattctctctttcttgaacaacatacgattaccctcccttgccatgatgaagtcgatttagatcatgtggtttcagccatacaatcatttatcaaatttaaggttgattagttcaaaatatcccgttcacagagaatagtgaacgggatattttttattcttaatacaagaataaaaaaacaggtagtaaaccatagatttaccacctgattcattcacataacaatacagcgaacttccatgaaaaaaaacattcacctgtagattaagagacagttggaccgagaatatatgcaaatctgttagaatgaaaatgctagtggaatattcgatgtttttacaagcatcgtttaatatttggacagacaatgtgtaactctcaattgtacaattagttttctttaaagagaaactgctccgcaagaaaaacctacggaacagcttcctaatgagaatattaattagaaagtttttcgatttggatatgaccgctgtttcctgtagcaagagttaacgctaatccagtgacggcaatctgaatagtagaagggacagcagtaacttcaatcatagcttctcccactaatggagtacctacgctgattaaa

SEQ ID NO: 167 - protein, 364 aa, Bacillus licheniformis
MIRLIEPYITFEEVQAELKEIFSSGMLTKGPYVRTFADHMRQYVSAKHAFLTTSATTALSMCLKSLNVQPGDEVIVSDFSFPATVNVIEDLGAKPVFADVDLETFNMLPEELESQITSRTKAVLFVDALGNPTGITNIKQICKEYGLPLVDDAACAIGSSEYGCKSGKIADLTCFSFHPRKLLTTGEGGAITTDREELKDWLSVKLNHGAAISDGKLDFIDFGYNYRLSDIQAALGIKQLQKLDDIIHRRNLQQKAYSEQLEPLGFQSQKIGPAVVHNIQSAVFKVPKNIVRDELIQYLSDCHIESTFGTYCLSGTPYYRRKYQQLKSNSLFLEQHTITLPCHDEVDLDHVVSAIQSFIKFKVD

SEQ ID NO: 168 - DNA, 1663 bp, Bacillus licheniformis
  CDS (501)..(1163)
tccgttgcctttctgatcttcagcgccggagccttgactgttttgcttttgattctcgcgtggtttccggttcatcaaacacagctgctcctcgtatttttcatcgggctgtcggcagccggcatttttccgtgcgccgtcactcttgcctcgttggctggaaagccttttacagaggaaatcacgagtctcttcatttcgtccgcaagtctgggaggagcgcttctttcattcttgatcggctgggcgattgatgcaagcgcagccgctgtcttcccgtttttgctgttcggcggattggggggcttgctgctggcgatcagcgcggtgatttttttatccggcctgcaaaaaaacaagcagagtcatttggatatgtagatttattaggaagagattacaagcttagtaggatttttttcagcagccgtttaaaccgttccatctttgaccataatattgctagaaaaggttgaagaacgagaggaacggtggggaaaatgaagaaatcaaacattgcctgtatgtatatttttcttttattaataggagcgcttgcaaatctcacgacggaagagactgcccaatcatcaggcgggcagcctgccgtgattcctgatgaagcgattcggctgcggattttggcaaacagcgacagcgggagcgaccagagcgtcaaacgcaaaatcagggatgaggtcaataaacaaattacgaaatgggtggaaaacctgacctcggttgaggaagcgagacaagtcatcaggtcgaagctgcctgaaatccaagaggttgccatggatgtcatgaaacgcgaaaatgttcggcaatccgtgtctgtccgttttgatcgtgtttcatttccgacaaagctatacggcaatatggtgtatccggccggagaatatgaggctgttttaattacattaggcaagggagagggagccaactggtggtgcgtcctgtttccgccactttgctttcttgatttttccaatggggaagccgtaaagtcgcctgaagacgaacaaaccgctgccggagaagaccgccgggaagaaaaaacagacgcggcggatgaaacggtatctggcatagataaagataaagaagacaaagaagtgaaattttttcttgtcgaatggattaccgggcttttttcttaaaaggaccgccttgctttcgtgtgcagggcggttttttactgtttgttttttcatgatggttattgaagcttttgaatatgatataattttccaaaacggttcaggggaaatactgcttttcggatatacaccttttgcccctttctgatgtgccaatcacattgccggcagaagagaaactgtcttatcaccagtacagcgttcatttgcatactcattcaaagcgttggttcctgctaatcaaaattgaaaaatgaatagccggcattcttccaaatcaaaaggtatattttactgtcgccctcatagattggatagagaagttaaaaaacggggtgaaaagatgttctaccaattgaggttagcggaaacgaaagacatgaatgcgatcgaagcatttttaaaaaaggcggggacaagccataagggtcttgaggaagcgaagagccagtttatcatgatggaagaccctcccgatgaaatcgtcgcctgcctcg

SEQ ID NO: 169 - protein, 221 aa, Bacillus licheniformis
MKKSNIACMYIFLLLIGALANLTTEETAQSSGGQPAVIPDEAIRLRILANSDSGSDQSVKRKIRDEVNKQITKWVENLTSVEEARQVIRSKLPEIQEVAMDVMKRENVRQSVSVRFDRVSFPTKLYGNMVYPAGEYEAVLITLGKGEGANWWCVLFPPLCFLDFSNGEAVKSPEDEQTAAGEDRREEKTDAADETVSGIDKDKEDKEVKFFLVEWITGLFS

SEQ ID NO: 170 - DNA, 1351 bp, Bacillus licheniformis
  CDS (501)..(851)
tttttggagccagcacgccgaaagaacgaaatgcccaaatcacaaaaatgcttgattttgcgttcagccaatatgaaacgcatccgatgtataaacgtaacgaaatcatttccgatttgaaggtcaataaaggccgtgagcaaaaaataaaccttgtcacatcagaaccgatttcccttttgacgaaaaaaggcgaaaatatcgaatctgttaaaaaagaaatcaaacagaaagaagatatccaggcccctgtcaaaaaaggcacagagcttgggacgctcgttttgaaaaaggatggaaaggtgctcgctgaaagtcctcttgtcgctgaaaaagatatggacaaagcggggatgtggacgatgttcaagcggacgatgacccactggacgaagtggagtgaataatgccgaacggtcactagttttgtcacggtgaaggaatttataaagtctgaagcgaaacactcattatccgatttaaaccaaggaggaatgaggatgagcctcggaatcgatattcacgtcaaagaatccgtattatgcattcggttgacaggtgaactcgatcaccatacagcagaaaccttgagaaaacaagtcagtgaccatctggaacaaaccgacattcgccatattgtcatgaatcttgcagacctttcgtttatggacagttcagggcttggcgtcgtgctcggcagatataaggagattaagcagctcggcggagaaatgatcgtctgcgccatttcccctgctgtcaaacgtttatttgatatgtccgggctgtttaaaatcattcgccttgagcaatcagagcagcgtgcacttgaaacgttgggggtggcgtcatgaaaaatgaaatgaacattcagtttacagcgctcagccaaaatgaatcgtttgcacgggtgacagtcgctgcttttatcgctcagcttgacccgacgatggatgaactgaccgaaattaaaacggtcgtatccgaagcggtcacaaacgcgatcattcacggttatgaaaactcagggcagggaaacgtatatatttccgtcactctcgaggaccatattgtctatttaacgatccgcgacgaaggagtcggcatccctaatcttgaagaagcgcgccagcccctgttcacgacaaagcctgaactcgagcggtcgggaatgggctttacgatcatggaaaatttcatggatgatatttcgatcgactcctcacctgagatgggaaccacaatacacttaacaaagcacttatcaaaaagcaaagcgctttgcaattaagggagatttgttatggatgtggaggttaaaaaagaaaaccagaacactcagcttaaagac

SEQ ID NO: 171 - protein, 117 aa, Bacillus licheniformis
MSLGIDIHVKESVLCIRLTGELDHHTAETLRKQVSDHLEQTDIRHIVMNLADLSFMDSSGLGVVLGRYKEIKQLGGEMIVCAISPAVKRLFDMSGLFKIIRLEQSEQRALETLGVAS

SEQ ID NO: 172 - DNA, 1438 bp, Bacillus licheniformis
  CDS (501)..(938)
gggatgtggacgatgttcaagcggacgatgacccactggacgaagtggagtgaataatgccgaacggtcactagttttgtcacggtgaaggaatttataaagtctgaagcgaaacactcattatccgatttaaaccaaggaggaatgaggatgagcctcggaatcgatattcacgtcaaagaatccgtattatgcattcggttgacaggtgaactcgatcaccatacagcagaaaccttgagaaaacaagtcagtgaccatctggaacaaaccgacattcgccatattgtcatgaatcttgcagacctttcgtttatggacagttcagggcttggcgtcgtgctcggcagatataaggagattaagcagctcggcggagaaatgatcgtctgcgccatttcccctgctgtcaaacgtttatttgatatgtccgggctgtttaaaatcattcgccttgagcaatcagagcagcgtgcacttgaaacgttgggggtggcgtcatgaaaaatgaaatgaacattcagtttacagcgctcagccaaaatgaatcgtttgcacgggtgacagtcgctgcttttatcgctcagcttgacccgacgatggatgaactgaccgaaattaaaacggtcgtatccgaagcggtcacaaacgcgatcattcacggttatgaaaactcagggcagggaaacgtatatatttccgtcactctcgaggaccatattgtctatttaacgatccgcgacgaaggagtcggcatccctaatcttgaagaagcgcgccagcccctgttcacgacaaagcctgaactcgagcggtcgggaatgggctttacgatcatggaaaatttcatggatgatatttcgatcgactcctcacctgagatgggaaccacaatacacttaacaaagcacttatcaaaaagcaaagcgctttgcaattaagggagatttgttatggatgtggaggttaaaaaagaaaaccagaacactcagcttaaagaccatgaagtgaaagaactgattaaaaacagccagaacggcgatcaaaaagcaagggacctcctcatagaaaaaaacatgcgtcttgtttggtctgtcgttcagcgttttttgaacagaggctatgagcctgacgacctctttcaaatcggctgcatcggcctcttgaagtcggtggacaaattcgatctttcctatgacgttcggttttccacctacgccgttccgatgattatcggcgagattcagcggtttatcagagatgacggaaccgtcaaagtgagccgctcgctgaaagaactcggcaacaaaatccggcgggcgaaagacgagctttccaagtcaaacggccggattccgaccgttcaggaaatcgccgattatctcgaaatcagttcagaagaggtcgtgatggcccaggaagcggtccgctctccctc

SEQ ID NO: 173 - protein, 146 aa, Bacillus licheniformis
MKNEMNIQFTALSQNESFARVTVAAFIAQLDPTMDELTEIKTVVSEAVTNAIIHGYENSGQGNVYISVTLEDHIVYLTIRDEGVGIPNLEEARQPLFTTKPELERSGMGFTIMENFMDDISIDSSPEMGTTIHLTKHLSKSKALCN

SEQ ID NO: 174 - DNA, 5482 bp, Bacillus licheniformis
  CDS (501)..(4982)
tggcttattcgtatatcatcgttgacaatgtactgaaggaagccgatttacaggaagatgccatgaagagcctgacgcttcaagtcgatccgaataatttcctttactggattcagatcggacgcggcgccaataaagaagcgcttgagacggcccgtaagctggaaaacaatgcacagatcatgttggcacttatgaaatacacagatgacattaaagccgatgataaattgtccagtgatgagcggcagaaacagctggatccgctcgaaaaagaacttgaagaattgaagcggacagcggatgaacagaaagccaaaactgaagaaaaccagcaggcaaacaccgagcaaaaccaggcggacgtagaggccgcaaaggctgaaacggagaaggccgagaaggaacaggcgaaaaaagaaaataaagaaaaggaagacaaaaagaaaaaagatgacaaataaaagcgaaaacacctgttgttggcaggaggcggagaaatgagtctgttatggattttttatcataaaaactatcaaaaaataaaactggatgatcagaacagccgcacgctcaccatcgggccggatttgaaacattctgtcacgattaagcatttttcatttgaaaaaggcccggtgacactggaaaagcagaaggactcagacgctttgaacgtgcagctgggaggggagacggtctcttctttaaagcttggcggaaaggcgtccgtccaaagcggcgctgaacagctgacgctctttttagccgaagaagccgacagcgttcctgcctactatttgggagagagacaggaaatcgtcatttcttccctcgatcaagaagcggatgtttatttcaatgaaacggattcattctttggagaaaaaggtacgttctctttcatccgcctcgacgggcaatggaatgtcctgccgaatgacgcgaaaatttatttgaacggagaagaagtgtccgcccctgtctccgtgcaaaatggagacgaaatcgcatttggactgaatattcttcgcatcgttgaagacgacctcttggaaatcgagggattcgggaagtttgatacgtctttggagaacattcttaagccgagctccgagacaaaaaataaatatccgcaataccgcaggccgccgagaatgatttacgacctgccggatgaaaaagtatccttcagcttcccggcacaggaaagcgacggagacaacagaggcctatggctgatgattctgcctccgctcgtcatgctgatcgtcatggggatcgtggcgctcattcagccgcgggggatctttatcatcgtttcccttgcgatgtttatgatgacgctgattacgtcaaccgtgcagtacttccgcgacaaaaatcagcgtaaaaaaagagaagaaaaaagagagcgggtctataccctttaccttgaaaacaaaaagaaagagctgcatgaacttgcagaaagacaaaagttcgtacttgatttccattttcctacatttgagagaatgaaatatttaacaaaggagatcagcggacgaatttgggaaaaatcgattgaaagcgccgattttctgcaaatccgccttggaacgggaaatgttgcatcttcgtaccaaatcaatttgaacggcggagatttggccaaccgcgatacagaccatctccttgaacaaacgcaaaaaatggaagaggtctacagagagctgaaaaatgcgccgatcactgtgaatcttgccgaaggcccgatgggcgtcgtcggaaaattgtccgtcgtcaaaaatgaaattcatcagcttgtcggccagctcgcatttttccacagctatcatgacttgcgctttgtctttatttttgacgaagccgagtatcaagaatgggaatggatgaagtggctcccgcattttcagatgcctcatatttatgcgaaagggtttatttacaacgaacagacgagagatcagctcctttcaagcatatatgagattttgagagaacgggatttagatgaaaacaaaaagaagactttgtttaagccgcactttgtgtttatcatcacaaatcagcagctcatcgcagaacacgtcattttagaatatttggaaggcaagcagaaacacctcggagtgtcgacaatcgtggcggcagagacaaaagaaagcctgtccgaaaacattcatacccttgttcgttatattactgaacaggaaggcgacattctgatcaagcaaaagaaagccgtccagatcccgtttcagctggatcaccacaacagggaagacaacgaacagttttcccggacgctgagaacgcttgaccaccagacgggcatgacgaattcgattcctgataccgtatcgtttctcgaactgttccaagtgaaggaagtcgatgacatcggcatcgaacaaaaatggatgacaagcgaatcggccaaatctttggccgtgccgatcggctataaaggaaaagacgacattgtttatttaaaccttcacgaaaaggcgcacggcccccacgggctgcttgccggaacgaccggttcgggtaaaagtgaatttttgcagacttatattttgtctttggcagttcactttcacccgcatgaagtcgcatttttgctaatcgactacaaagggggcggaatggcgcagccgttccggaacattccgcatttgctcggaacgattactaacattgaaggcagcaagaacttcagcaaccgggcgcttgcgtccattaagagcgagctgaagaaaaggcagcggctctttgatcagtacaaagtgaaccatatcaacgactatacaaagctttacaaacagaaaaaagcgaaaacggcgatgccgcaccttttcttaatttcagacgaatttgccgagctgaaaagcgaagaaccggaatttatccgcgagcttgtcagtgcggcaaggatcgggcgaagcctcggggtgcacttaatcttggcgacgcaaaaaccgggcggcatcatcgatgaccagatttggagcaactccagattcaaggtcgccttgaaggtgcaggatgcgaatgacagtaaagagatcctcaaaaacggggatgcggctaccatcacggtaacgggccgcggctatttgcaagtcggcaacaacgaggtgtatgaactgttccagtctgcatggagcggagccccttacatggaggacggctacggcacagaggatgaagtggcgatcgtcacagataccggattaattcctttatcagatgttgatgctgatcgcgctgcgaaaaaagaggctgtgacggaaatttcggcagtcgtcgaacaaattgaacggattcaagcggagatgggaatcgagaagctcccgagcccttggctgccgccgcttgaagaacgcataccgaaaacgcgctatccgtcggaggaagccgatgcctttaactttgcctatatcgatgaacctgaaaagcaaagccaggagccgatcagctaccgcatgatggaagacggcaatatcggcatcgtcggctcgtcaggctacggaaaatccctgacagccacgacgttcatgatgagctttgccgaacagtatacgccggaagaattgcattactacattttcgactttggcaacggaacgctgcttccgcttgcaaggcttccgcacaccgcggattatttcctgatggaccaaacgagaaaaatcgagaaatttatggtccggatcaaggcggaaatcgagcacaggaaaaatctcttccgtgcaaaagaaatcagccatatcaagatgtacaatgcgctgaatgaggaaaagctgccgtttattttcataacggtcgacaactttgacatcattaaagacgaaatgcatgaactcgaaagcgaatttatccagttttcacgagacggccagtcgcttggaatttatttaatcctgaccgcgacaagggtcaatgcaatcagacagtcgctcttgaacaacctgaaaacgagggttgtccactatctgatggatcagtctgaagcatattcgattatcggaaggccggaattcagccttgaaccgatccctggacgcgttattatcaataaagaaaaccaatacttcgcacaaatgtttatgcctgtggaagcggacaacgatatcgagctgtttgaagggatcaaagccgacattcaggcgatcgcagaacgctcggaaggcatgagaaagccggcgcctgtgccgatgctgccgctcgagctttccgtcacacagtttgtgagagattatccgcttcagcctgaaagaggccttattccaatgggactcgatgaagaaactgtcgaacccgtatactttaatcttgagaaaaataagcactgcctcattatgggtcagacgcagcgcggaaaaacaaacgtcatcaagatcatgctcgagcacctgcttgaccatgacacgaaaaaaatcgccgtgtttgattcgatagacagagggctttctcaatatgcgacagaggatcaaatcagctatctagaaacaaaagacgacattctgctctggctcgctgagacggaagaaatttgccggacaagggaagcgatgtatttggaagccgttaaacaaggagaaatcgccaaccttgatttctcaccgatggtctttattgtcgacggaatttcacggttccagcagacgatcgacgcatcgattcaggacaaaatggcgatgttcatgaaatcttacgcccatttaggtttccactttatacctgccggaaatcacagcgagttcacaaaaggctatgattcgctgacaagcgaagtcaagcaggtcagacacgcgatgctattgatgaaaaaatccgagcagaacttgattcagctcccatatgaacgccaggagccggaaattctgccgggctttggctatatcgttgaaaacggcaaagagaggaaaattcaaattcctttatgtgctgtagaaaggaagaaagcgaaatgacggaacaacaaaaaagcacgctgaaaattatcagcgccatcgtcacgatcatcttgctgcccgtcctgttttttcatttcatcggtgagaacccgacgaaaaaggtatcgaacgcgacaagggaaatcgccgttgtcaatgaggataccggcgttttgaaagatgacggaaccgttgatcaagatgcgctgctgggaaacgaaatctcggcttccctggttgaccgtccggattataaatggacggtcgtcaaccggagcgcagcagaaagcggacttgcggagaagcaatacgatgcgattgtctacattccgtcggacttttcgcaaaacattttaagctacaaccatgagcgtccgcaaaaagcggagctggaattcaaaattcaggaccagctcgacgccgtcaacaaggaaaaagtccagcgcgagcttcaggacgcgcaaaaaacggtgagcaagaaaatgtcttccctgtactggcgctttgtcaaacag

SEQ ID NO: 175 - protein, 1494 aa, Bacillus licheniformis
MSLLWIFYHKNYQKIKLDDQNSRTLTIGPDLKHSVTIKHFSFEKGPVTLEKQKDSDALNVQLGGETVSSLKLGGKASVQSGAEQLTLFLAEEADSVPAYYLGERQEIVISSLDQEADVYFNETDSFFGEKGTFSFIRLDGQWNVLPNDAKIYLNGEEVSAPVSVQNGDEIAFGLNILRIVEDDLLEIEGFGKFDTSLENILKPSSETKNKYPQYRRPPRMIYDLPDEKVSFSFPAQESDGDNRGLWLMILPPLVMLIVMGIVALIQPRGIFIIVSLAMFMMTLITSTVQYFRDKNQRKKREEKRERVYTLYLENKKKELHELAERQKFVLDFHFPTFERMKYLTKEISGRIWEKSIESADFLQIRLGTGNVASSYQINLNGGDLANRDTDHLLEQTQKMEEVYRELKNAPITVNLAEGPMGVVGKLSVVKNEIHQLVGQLAFFHSYHDLRFVFIFDEAEYQEWEWMKWLPHFQMPHIYAKGFIYNEQTRDQLLSSIYEILRERDLDENKKKTLFKPHFVFIITNQQLIAEHVILEYLEGKQKHLGVSTIVAAETKESLSENIHTLVRYITEQEGDILIKQKKAVQIPFQLDHHNREDNEQFSRTLRTLDHQTGMTNSIPDTVSFLELFQVKEVDDIGIEQKWMTSESAKSLAVPIGYKGKDDIVYLNLHEKAHGPHGLLAGTTGSGKSEFLQTYILSLAVHFHPHEVAFLLIDYKGGGMAQPFRNIPHLLGTITNIEGSKNFSNRALASIKSELKKRQRLFDQYKVNHINDYTKLYKQKKAKTAMPHLFLISDEFAELKSEEPEFIRELVSAARIGRSLGVHLILATQKPGGIIDDQIWSNSRFKVALKVQDANDSKEILKNGDAATITVTGRGYLQVGNNEVYELFQSAWSGAPYMEDGYGTEDEVAIVTDTGLIPLSDVDADRAAKKEAVTEISAVVEQIERIQAEMGIEKLPSPWLPPLEERIPKTRYPSEEADAFNFAYIDEPEKQSQEPISYRMMEDGNIGIVGSSGYGKSLTATTFMMSFAEQYTPEELHYYIFDFGNGTLLPLARLPHTADYFLMDQTRKIEKFMVRIKAEIEHRKNLFRAKEISHIKMYNALNEEKLPFIFITVDNFDIIKDEMHELESEFIQFSRDGQSLGIYLILTATRVNAIRQSLLNNLKTRVVHYLMDQSEAYSIIGRPEFSLEPIPGRVIINKENQYFAQMFMPVEADNDIELFEGIKADIQAIAERSEGMRKPAPVPMLPLELSVTQFVRDYPLQPERGLIPMGLDEETVEPVYFNLEKNKHCLIMGQTQRGKTNVIKIMLEHLLDHDTKKIAVFDSIDRGLSQYATEDQISYLETKDDILLWLAETEEICRTREAMYLEAVKQGEIANLDFSPMVFIVDGISRFQQTIDASIQDKMAMFMKSYAHLGFHFIPAGNHSEFTKGYDSLTSEVKQVRHAMLLMKKSEQNLIQLPYERQEPEILPGFGYIVENGKERKIQIPLCAVERKKAK

SEQ ID NO: 176 - DNA, 3343 bp, Bacillus licheniformis
  CDS (501)..(2843)
tgtattcaaaaaacaatttaacccgtgacatcgagacgaatgtcataggaaaaaatgcggttaaatacggattaatcgatgaaaaccggcgagagacagacaggcgattcaaaagctgatgaatataatcgaacaaaacaaggacgcacaggaagggataatccaatgattctgtatacgaaaatgccgcaggaaatcgtgttcgcagggcaggcggaaaactcgaaattaaaacagatcgatgtaaacagcgtgccacttttagtcgagatgaacggagaggaagcaagggacgttcaggttctcagcacgaacccgatggattttttaaaacaagaaacggcccctgggcagacgcttaaactgacattttataaatagctggagtgtctcaaggataaatatgctataataggggaatccagaggaaaatcgcagccgaaaaaaggctgctttctctttgtttttacattttttaacacgcagtaaggtgatggaacatggcaaaaagaaaacgaaaatcaacaaagaaacaaaaacaaggaaaaaaacggatccatcttaaatttgaattgtacggattaatctgtatcgccatctcgattattgcggttttgcagcttggcgtagcagggcaaacgttcatttacatgttccgctttttcgccggtgaatggttcatcctttgccttctcggcctctttttaacgggcttgtctttattttggaaaaagaaaacacccagttttttgacgaggagaaaagcgggcctttactgcatcattgcaagcatgctgcttctttcacatgtccagctgtttcagcatttgaccgaaaggggaatggttcagtctccgagcgtgatccaaaatacgtgggagctgtttctgatggatgtaaaaggcgagacaggatcgcctgatcttggaggcggaatgattggagcccttttattcgcggcgtcatattttctgtttgcatctgcaggatctaaaatcatcgccgtcttcctgatcttgatcggccttcttttgattacggatcggtcgcttcaggagacgctgatcaaatggatgaccccggtcgcctccttcatgaaaaaccagtggcaggcctttttagcagatcttaaacaattgaaaaacagctcgccgaaaaagaaatccggaaaaaaacaaaagacgcagagaaaaccgaaagtgtctgaagagcctgtacaagaagcggaccttgatccagatccggttattcaatcagaaccgattatttcaagcttttccgaccgtgatgaaaagcccgaagttcaagcttacgaagctccggcggctcctgctgaacctcctgctgagcccgaaatcggtgaggaaatgcaggcctccggcgcgcccgaaatcacgtttacagagctagaaaacaaggattaccagcttccgtcgattcaattgctggatgatccgaagcacacagggcagcaggcggataaaaagaatatttacgacaatgccaggaagctggaaaggacgtttcaaagcttcggagttaaggcgaaagtcacccaggttcatctcggcccggccgtcacgaaatatgaagtctatcctgatgtgggcgtcaaagtcagcaaaattgtcaacttaagtgacgacttggctttagcgctcgcggccaaggatatccgcatcgaagccccgatccccggaaaatcggcgattggaatcgaagtgccgaatgcggaagtggcgatggtttccttgaaagaagtgcttgaatcgaaactgaatgaccggccggatgcaaagctgatgatcggcctcggccggaacatttccggagaagcggtattggcagagctgaacaaaatgccccaccttcttgttgcaggagcgaccggaagcgggaaaagcgtctgtgtcaacgggatcattacaagcattttgatgagggcaaagccccacgaagtgaagatgatgatgattgatccgaaaatggtcgagctcaatgtctacaacgggattccgcatttgctcgctcccgtcgtgacagacccgaaaaaagcatcgcaggctttgaagaaagtcgtcaacgaaatggagcggcgctacgaattgttttctcacacgggaacgagaaatatcgaagggtataacgactatattaaacggatgaatgccgcagaagaagcaaagcagccggagcttccatacatcattgtgattgtggacgagcttgccgacctgatgatggtcgcttcctctgatgttgaagactcgatcacaaggctttcgcaaatggccagggcggcgggcatccacctgatcattgcgacgcagaggccttcggtcgatgttatcacaggggtcattaaagccaacattccgtcaaggatcgctttcagcgtatcgtctcagaccgactccaggacgattcttgatatgggaggcgctgaaaaacttctcggcagaggggacatgctgtttctccctgtcggcgccaataaaccgctccgcgttcaaggtgcctttctgtcagacgaagaagttgaaaaagttgtcgatcacgtcatcagccagcaaaaagcccaataccaagaagaaatgattccagaagagacgcaggaaacggtcagcgaagtgacagacgacctttatgacgaagcggtcgcacttgtggtcagcatgcagacggcttctgtatccatgctgcaaaggagattccgcatcggctatacaagagcggcgcggcttatcgatgccatggaagagcggggaatcgtcggcccatatgaaggatcaaaaccccgtgaagttctcttgtcaaaagagcaatacgaagaactctcttcttgagaagagagttcttgtttaacataatttcattatgtaaactaaaaaacatctatttatttatttgacaaaacatgatatagttatcctcaattaaagataatttgaatctgatctgtcagacggagggaaaacatgtcgataaaagctgacatcaacggttatgtttaaaggtgattgatcggataaaagatgatattcaaaatggggtcttttgcgaaaatgaacggctcccgagtgaatttgagctgtcaaagatgcttggtgtgagcagaacggctttgcgtgaggcgcttagaatactggaagaagaaaacgtcatcatcagaaggcatggagtcggacattttgtaaatgccagaccgttatttctatcaggtattgagcagctgaacagcgtcacaaaaatgatcgagcaggcaagcatgacgccgggaaccatttttatgtcctcacaggttaccgctcccactgaagaagatatgctccggtttcaatat

SEQ ID NO: 177 - protein, 781 aa, Bacillus licheniformis; identical to SEQ ID NO: 67

SEQ ID NO: 178 - DNA, 1735 bp, Bacillus licheniformis
  CDS (501)..(1235)
gatattgtgcgtaaacactatcttccgatccggtgaagacgagttcgacgtcgggattctgttttgcaaactgctcaaaccgttgtttaattgcagtctggcctttctctttgtacgctttttgatcaatccattcgctgaaatacgcaatggaagtctccttgctgccgatatcttgctgaataatgtcgttcagttcatcgatattgtctttcgcacttctcaaaatctcatcctcgagcgtgctgctggccgtaaaatatgaagtaaccgaaagaaccaagatcggaattgttaaaatgaatataaatgagaaaattaattttttagaaatagaaggacgtttcgtccaatttaaaagctttttcatgtgtgattcccctttctctacttttatcggagacggggtctattttttaaataaaaaaagcggaaaattagaccgttttcctgcccaagcatcaggcatacgctaataaaaaaggaaaagggtgtatcctatgataagtgtttcgggctaccggctccgtcctgaggatatcgaaaaactgaatgtcagtcagacgcagagagacatcgcaaaccggatgctggccatgccgtccggatatagatacggttcaatctcagaactgttatttgagctgagattcagagagcataccgtcaaatcggccagagagctgatcaacagcggagcgaagtttgccaccttttcaaagacatacgggaatgaagagttttggagggtgacgcctgagggggctttggagttgaagtacagggcaccggcttcaaaggcgattcgaaatatttttgaaagcggcccttcttatgcttttgagtgcgcgactgcgattgtcatcattttttatatggcgcttctcaaaacgatcggcgaccagacatttgaccggaattatcaaaggatcattttatacgattggcactatgagcggctgccgatctatacggataaaggaaacgactaccttccgggagactgcctgtatttcaagaaccctgaattcgatccctcaagaccgcagtggcgcggagaaaatgctattttacttgaaaataatctctatgcggcacacggcctggggatcttaagcggcgaaacaatcattgaaaaactgaacgggctgagaaagcctcatgcacagacgtccgcctatctgctttcccaagtgacgcgggttgatattccggcattaattcaaatgatcagatagcacatcggccggcacaagctgatccatcagctccttcaccgtcgtttgctcgacggtggcccgcacgctctgtccggcccacaatgacatgttatccgtattcccgtcaagcttcgcctgttttctcatcggttgcgtcagcgtgttttgcagaggataaggcagcgcttcagcttcttcctggcgtctgtcttccatccactgattgacgatgcctcttgccggcttccccgagaacaaacgggtcaggcttgtgtcggtttcaaccgcttcgaacaatttttgtttgtaggcagggtgtgttccgctttcttcgcacgtcaaaaaagcggtaccgatttgaacgccctgtgcgccgagggcaaaagctgcagcaacacctcttttgtcaaaaatgccgcccgctgcgataactggaaccgacacatgatctgccgcttggggaattaaagccatcgagccgacagcaggctctcccttcgttttcaagaaggctc

SEQ ID NO: 179 - protein, 245 aa, Bacillus licheniformis
MISVSGYRLRPEDIEKLNVSQTQRDIANRMLAMPSGYRYGSISELLFELRFREHTVKSARELINSGAKFATFSKTYGNEEFWRVTPEGALELKYRAPASKAIRNIFESGPSYAFECATAIVIIFYMALLKTIGDQTFDRNYQRIILYDWHYERLPIYTDKGNDYLPGDCLYFKNPEFDPSRPQWRGENAILLENNLYAAHGLGILSGETIIEKLNGLRKPHAQTSAYLLSQVTRVDIPALIQMIR

SEQ ID NO: 180 - DNA, 1405 bp, Bacillus licheniformis
  CDS (501)..(905)
aggctatactacagtctgaggtgattgaaattggccaaacgaaaagcaaatcatgtaataaatggaatgaacaatgcgaaacgccaaggaaacggcgcgggatatattgaaaatgatcagcacatactcactgaggcggaacgccaaaacaacaaaaaacggaaaaccaatcaataaatacgaaagatccttcatgaatatcttaggaggttaaaacattgacaaataaaaacgacggcaaagatatgcgcaaaaacgcaccgaaaggagctcagccggggcagccagagcctttgagcggaagcaaaaaagtaaaaaaccggaaccatacaagacaaaaacacaattccagtcacgatatgtaacattttttccgcgcctttcacggcgcggtttttttccttaccgcgcgtcaccctgaggcgttgtccaccctccttcacatgaattcaaaggtgtgcataatctaatggtaaggctaggtatggaggaatgctccaatgacaaatacaaaacgtttcgattccgcagattttgataaagaatggatgaaacagtttgttgacgacccttttctcctctatgatgaaactttaccgattgacctttatgaaacgagcactgaatatataattgaagcagatttaagccacttgaatgtccggcatcttgacttgacgttttcaggctacgatttcaagcttgcagttaaaaccgatgagcagctttacgagaaatcgctgatgcttcctttctttttgaatgacaaacagatcgaagcggaatgcgaaaacaacattcttgcagttaaaatcaataaagaatcaagcaaagatgacatttcgctttcaatcaatattccttttatatcaaacctgcacaacaagcagaacccggacagcgcttaaaacacttgccatccgggtttttttccgttcgttcgtcaaatatcctctagcaattctctatggccgattagggaatcgctatacaatagattatgttctagcatctcttttgaccaggccggtgtcccattttatattattttttctatgttcttctaaaacgccttcatgtaaaataggttatagacaaaggagtgatgagagatgctggaaggatggtttttatggctgatgctcgcttggatcgtcatcatgatcgtcctcttgtcaatcggcggttttttcatgtttcgcaaatttttaaaaaggctgcctaaagaagatgggaaatctgagctggactggcaggattattatattgaacagacaaggcatttgtggaatgacgaagaaaaagaactgcttgaggaattggtttcacccgtacccgagctgtttcgcgatgtagcaaaagcaaaaatcgccggtaagatcggggagcttgcattgaaagaaaa

SEQ ID NO: 181 - protein, 135 aa, Bacillus licheniformis
MTNTKRFDSADFDKEWMKQFVDDPFLLYDETLPIDLYETSTEYIIEADLSHLNVRHLDLTFSGYDFKLAVKTDEQLYEKSLMLPFFLNDKQIEAECENNILAVKINKESSKDDISLSINIPFISNLHNKQNPDSA

SEQ ID NO: 182 - DNA, 2155 bp, Bacillus licheniformis
  CDS (501)..(1655)
aaaggttttcagaaagcttcggcgtttcttttgatgagctgatgacagcggccggctatgcgatggagaagacgcaggaaagcgaacgtccggatattcactcgtcagttgccgaaattgaagatgttttgcaaacctcaaatgtctatgatcggccatttaccatggaagaactgaaaaacaaattgaatgagtgcgaacaatattctcagacggaggaaggaaagcgtaccattctggctgagtttgaatctaaaatcgagaaagttgccggcattggtccttttctgacccgtctgcacgacatgtacagcagatttacctcggggcgggggacgccgcgtgaattgctgctgatgggcggcgctttgctgtatttcatcgtttctgttgatgtcataccggattatatttttccgatcggctatatcgatgatgcggcagcggttcatttcgttttcaaccagctgtcatataaatcatgatggagcatgttcaagatgaaaagaaagcatatcaacattgacatcagtctgctgctcattctattttgtttgtttatcatcagcctgctggccgtttacagcgggtcgggccagtatgaaacacaggaccctttttattttgccaaacggcaggtcttttggtatcttgtcgggtttggcgtcatggcgggaacggcctacatcgactatgagctgcttgaacgattggcgcttcgtttatttgtgggagccgtttttcttctgattctcgttcatttttttggaacttacaaaaacggttcgcaaaggtggatcagcttcggggtcatcgaaatccagccttcagaatttatgaagatcattttgattcttctgctggcttcgatactcaatcaatttcagcataaaaggttctccttcgccgagagcatcattccgacgggaaaaatcatgatgtacacggtgattccgtttttctttatattggttcagccagatttagggtccgcattggtgattttatcgatcgcattcacgttgatgctggtctcggggatttcgggcaggatgatcgtgtccctgtcacttggattcatggcattggttgcctttttgacgtatttgcacaatcattactttgagatattttcaaagattattaagcctcaccagcttgaccggatatatggctggctcagtcctcatgaacatgcctctacatatggataccagctgacgcaggcgttattggggatcggatcaggccagctgtcagggagcggctttactcaaggaatccaagttcagggagggaaaattccggaggctcatactgattttattttcgccgtgattggtgaggaattcggttttttgggtgccgtaacattagtctgtctgtattttctgatgatctacagaatcatcaggattgcgctttcgtccaacagtctgttcggtctttatatatgtgcgggggttgcagggttgattgtattccaagtgttccaaaatatcgggatgacgatcgggttaatgccgatcacggggctcgctcttccgtttatcagctatggcggcagcgcgctgttgaccaacatgatcgctttaggtctcgttttcagtgtgaatatcagatctaaacattacatgtttgggaatgattggggatgaagttgctcaaaatgattctttcccatctaaagaaacttgattatgtattgattgccgcggttctgtttttatctgcgtttggcttgctgatggtatacagcgccggctaccccctcggatatatgaagtatcatgatggcagctatttttttatgaagcagctgcaatggctgctcatcggtttggcctttttttcggctgccgccattttcccatacaaagcttacagcaaactcattcggtttttggtgaagctttcttttttaatgctgattctcgttttgctgccgggaatcgggatggagaaaaacaattcccaaaggtggattcaattcggttcgctcatgattcagccgtctgaggctgtgaagcttgtgatggttatttatttcgcctatgtgtatgcaaaaaagcagaaatacatcgccgatttcggaaagggcgtcatgccgccgctgctgattttggcggctgtgttttttttgattttaaaacag

SEQ ID NO: 183 - protein, 385 aa, Bacillus licheniformis
MKRKHINIDISLLLILFCLFIISLLAVYSGSGQYETQDPFYFAKRQVFWYLVGFGVMAGTAYIDYELLERLALRLFVGAVFLLILVHFFGTYKNGSQRWISFGVIEIQPSEFMKIILILLLASILNQFQHKRFSFAESIIPTGKIMMYTVIPFFFILVQPDLGSALVILSIAFTLMLVSGISGRMIVSLSLGFMALVAFLTYLHNHYFEIFSKIIKPHQLDRIYGWLSPHEHASTYGYQLTQALLGIGSGQLSGSGFTQGIQVQGGKIPEAHTDFIFAVIGEEFGFLGAVTLVCLYFLMIYRIIRIALSSNSLFGLYICAGVAGLIVFQVFQNIGMTIGLMPITGLALPFISYGGSALLTNMIALGLVFSVNIRSKHYMFGNDWG

SEQ ID NO: 184 - DNA, 2113 bp, Bacillus licheniformis
  CDS (501)..(1613)
cgacgcggccgtccgtaaggtgctgacgagctttacaggtgttaagcacaggatgcaatacgtcgcgacgatcaaaaacagactgttttacaatgacagcaaagcgacaaacattcttgcgacgaaaaaagcgctgtccgcctttcaaaagccggtcattttgctggcaggggggcttgaccgcggaaatgaatttgatgaactaaagccgcatatgtcttttgtaaaagcggtgatcactttcggcgagaccgcgccgaagtttgagaagctggccgaagaaatgggaatacaacaggttaaacgtgtcgataatgttgaacaagcagcaactgcggcgttcagcctgtcagacgaaggagatgtcattcttctgtccccggcctgcgcaagctgggatcagtacaaaacatttgaagaacgtggtgacatgtttgtaaacgccgtgcatatgcttaaataagggcttgtctcgtaaagatagccctaagaattagagcttggggtgttcggctttgcaaacaaaaaaaacgtcaccggattttttgctggttatcattacgctattgcttttaacaatcggactgattatggtatacagcgccagtgcagtatgggcgacttacaaatacgacgactcctttttctttgcgaaacggcagcttttgtttgccggcatcggggtcatcgccatgtttttcatcatgaacgtcgactactggacgtggaggacttatgcgaaaatactgatcattgtatgtttctttctgctcatcatcgtcctggttcccgggatcggcatggaacggaacgggtcgaggagctggatcggagtcggcgctttcagcattcagccgtccgagtttatgaaactcgcgatgatcgcatttttggccaagtttttatctgaaaagcaaaagaatattacgtcgtttagaaaaggctttgtgccggcgctgggcattgtcttttcagcttttctgatcatcatgatgcagcctgacctcggaacaggaaccgtgatggtcggcacatgcatcattatgatctttgtcgcgggggcgagaatttcgcacttcgtttttctcggcctgatcggactgagcggttttgtcggccttgtgctgtcggcgccgtaccggatcaaaaggatcacttcatacttgaacccttgggaggaccctttaggaagcggctttcaaatcattcagtctctttatgcggtggggcccggcgggctgttcggcctcggcctcggccagagcaggcaaaagtttttctatctgcctgagccgcagacagattttatttttgcgattttatcagaggagctcggctttatcggcggatcgctgattcttttgctcttcagcgttctattatggagaggcatcagaatcgcgctcggtgcgcccgatttatacggcagttttgtcgccgtcggcgtcatttcgatgatagcgattcaggttatgatcaatatcggagtcgtgactggtttgattcctgttacaggcattacgcttccgtttttaagctatggcggttcatcactgaccttgatgctcatggcggtcggcgtgctgctgaatgtcagcaggtattctagatactagattttggcgataaccctgttgcgagatagcagggttatcggcgtgtacataaggattaagggggagaacagatgcggattgttgttagcggaggcggaacgggcggccatatttaccccgcccttgcgtttattaaagaagtgaaacggcatcacgaagatgttgagtttttatatatcggaaccgaaaaaggcctggagaaaaatatcgtcgagcgggaagggatccctttcaaagcgattgaaattacgggttttaaaagaaaactttcatttgaaaacgtcaaaaccgtcatgcgctttttaaagggtgtaaaagaatgcaaagaagaattaaaacggttcaagccggatgccgtgatcggcacgggcggctacgtgtgcggccccgtcgtatacgccgcttcaaaactggggattccgacgattatccacgaacaaaacagccttcccggactcaccaataagtttttatccaaatatgttgataaggtagcg

SEQ ID NO: 185 - protein, 371 aa, Bacillus licheniformis
LGCSALQTKKTSPDFLLVIITLLLLTIGLIMVYSASAVWATYKYDDSFFFAKRQLLFAGIGVIAMFFIMNVDYWTWRTYAKILIIVCFFLLIIVLVPGIGMERNGSRSWIGVGAFSIQPSEFMKLAMIAFLAKFLSEKQKNITSFRKGFVPALGIVFSAFLIIMMQPDLGTGTVMVGTCIIMIFVAGARISHFVFLGLIGLSGFVGLVLSAPYRIKRITSYLNPWEDPLGSGFQIIQSLYAVGPGGLFGLGLGQSRQKFFYLPEPQTDFIFAILSEELGFIGGSLILLLFSVLLWRGIRIALGAPDLYGSFVAVGVISMIAIQVMINIGVVTGLIPVTGITLPFLSYGGSSLTLMLMAVGVLLNVSRYSRY

SEQ ID NO: 186 - DNA, 2040 bp, Bacillus licheniformis
  CDS (501)..(1976)
ataaaaaagtcgtatccaagaacttattcatgcttgaccatgaaaagctcggactgaaagaggcgccttctgtcacgagtccgctttcgggcacctcgctgccgcttctcgtcgatgaaaaaggcgacattaaagtggattaccggatggatttggccaagctgatgaagaagtcgaaaaaaacggtaaagccgggcgaggaagtccaagatttgatgtgggaagagacgcctttcgttccggcgttttcggtaaagtacacagtgaatgacaaacaggaacctgtttttctcgaatagaatatcggtcaaaatgcaagtatcagtcatgaacctttctcctcggcatacaatgaggagaaaggttttttcatgtatgccgaaaaaatttccctaagctgtcatattgaaataggacaacgtcatacactatagtgtcctgtttttgattgatgaagaagtaaaaaattgaaaaggattggaagtccgggaggggatcacttggaaaaggtcgatattttcaaggatatcgctgaacgaacaggaggcgatatatacttaggtgtcgtaggagctgtacgtacaggaaaatctacgtttatcaaaaaatttatggagctagtggtgctcccgaatatcaacaatgaagcagaccgggcgcgcgcacaagatgagctcccccaaagtgccgctggcaaaaccattatgacaactgaaccgaagtttgttccgaatcaggcaatgtcagttcatgtcagtgacggactcgatgtgaatataaggcttgtcgactgcgtcggctatactgtacccggggcaaagggatacgaggatgaaaacgggccgagaatgatcaatactccttggtatgaagagccgattccgtttcacgaagctgccgaaatcggcacgagaaaagtcatccaagagcactccacaatcggtgttgtgattacgactgacggcacgattggagaaatcgccagacaggattatgtcgaggctgaagaacgggtgatcgacgagttgaaagaggttggaaaaccgtttatcatggtcatcaattccgtaaggccgtatcatccggaaacagaagcgctcaggcaagaattgatggaaaagtacgacattccggtgctggcgatgagcgttgaaagcatgagggaagcggacgttctgagcgttctcagagaagcgctttacgaattccctgtgctcgaagtcaacgtcaatcttccaagctgggtgatggtattaaaagagaatcattggctcagggaaaactatcaagattccgttaaagaaaccgtcaaagatattaaaagactgagagatgtcgaccgcgtcgtcggacacttcagcgaatttgatttcatcgagcgcgcaagcctcgccggaattgaaatgggccaggggatcgcggaaatcgatttatacgcgccggattacctgtacgatgaaattttgagggaagtcgtcggcgttgaaatcagaggaaaagatcacctccttcagctcatgcaggattttgcccatgccaagaccgaatatgatcaagtctcagatgcattgaaaatggtgaaacaaaccggctatggaatcgcagctcccgcattaaccgatatgagcctggatgaaccggaaatcatcaggcagggttcaagattcggagtccggctgaaggcggtggcgccgtcgattcatatgatcaaagtcgatgtggaaagcgagtttgcgccgatcatcggaacagagaagcagagcgaagagcttgtccgctatttaatgcaggactttgaggacgatccgctgtcaatctggaattccgacatattcggaagaagcttgagctcgatcgtcagagaagggattcaggcgaagctgtcactcatgcctgaaaatgcgagatataagctgaaggagacgctggagcgcattatcaatgaaggctcaggcggcttgattgcgatcatcttataaaagggaaggcctcttatcatacgggaggtctttttttatgcctgaaaacaggctgaacggg

SEQ ID NO: 187 - protein, 492 aa, Bacillus licheniformis
LEKVDIFKDIAERTGGDIYLGVVGAVRTGKSTFIKKFMELVVLPNINNEADRARAQDELPQSAAGKTIMTTEPKFVPNQAMSVHVSDGLDVNIRLVDCVGYTVPGAKGYEDENGPRMINTPWYEEPIPFHEAAEIGTRKVIQEHSTIGVVITTDGTIGEIARQDYVEAEERVIDELKEVGKPFIMVINSVRPYHPETEALRQELMEKYDIPVLAMSVESMREADVLSVLREALYEFPVLEVNVNLPSWVMVLKENHWLRENYQDSVKETVKDIKRLRDVDRVVGHFSEFDFIERASLAGIEMGQGIAEIDLYAPDYLYDEILREVVGVEIRGKDHLLQLMQDFAHAKTEYDQVSDALKMVKQTGYGIAAPALTDMSLDEPEIIRQGSRFGVRLKAVAPSIHMIKVDVESEFAPIIGTEKQSEELVRYLMQDFEDDPLSIWNSDIFGRSLSSIVREGIQAKLSLMPENARYKLKETLERIINEGSGGLIAIIL

SEQ ID NO: 188 - DNA, 5482 bp, Bacillus licheniformis; identical to SEQ ID NO: 174
  CDS (501)..(4982)

SEQ ID NO: 189 - protein, 1494 aa, Bacillus licheniformis; identical to SEQ ID NO: 175

SEQ ID NO: 190 - DNA, 3343 bp, Bacillus licheniformis; identical to SEQ ID NO: 176
  CDS (501)..(2843)

SEQ ID NO: 191 - protein, 781 aa, Bacillus licheniformis; identical to SEQ ID NO: 67

1-21. (canceled)

22. A Bacillus licheniformis mutant host cell derived from a parent B. licheniformis host cell, which mutant host cell is mutated in one or more gene(s) encoding one or more polypeptide(s) involved in sporulation which are at least 80% identical to one or more of the polypeptides shown in SEQ ID NOs: 2 to 191, wherein the mutant host cell expresses at least 5% less of the one or more polypeptide(s) involved in sporulation than the parent host cell, when they are cultivated under comparable conditions.

23. The host cell of claim 22, which is mutated by a partial or complete deletion of the one or more gene(s) encoding the one or more polypeptide(s) involved in sporulation.

24. The host cell of claim 22, in which two or more genes encoding two or more polypeptides involved in sporulation are mutated.

25. The host cell of claim 22, which comprises one or more heterologous gene(s) encoding one or more heterologous polypeptide(s).

26. The host cell of claim 25, wherein the heterologous gene(s) are present in at least two copies.

27. The host cell of claim 25, wherein the heterologous gene(s) are stably integrated into the genome of the cell.

28. The host cell of claim 25, wherein the heterologous gene(s) are integrated into the genome of the cell without leaving any antibiotic resistance marker genes at the site of integration.

29. The host cell of claim 25, wherein the heterologous gene(s) are transcribed from a heterologous promoter or from an artificial promoter.

30. The host cell of claim 25, wherein the heterologous gene(s) are comprised in an operon.

31. The host cell of claim 25, wherein the heterologous polypeptide(s) are antimicrobial peptides and/or fusion peptides comprising a peptide which in its native form has antimicrobial activity.

32. The host cell of claim 25, wherein the heterologous polypeptide(s) have biosynthetic activity and produce a compound or an intermediate of interest.

33. The host cell of claim 32, wherein the compound or intermediate of interest comprises vitamins, amino acids, antibiotics, carbohydrates, or surfactants.

34. The host cell of claim 33, wherein the carbohydrates comprise hyaluronic acid.

35. The host cell of claim 25, wherein the heterologous polypeptide(s) are enzyme(s).

36. The host cell of claim 35, wherein the enzyme(s) are enzyme(s) of a class selected from the group of enzyme classes consisting of oxidoreductases (EC 1), transferases (EC 2), hydrolases (EC 3), lyases (EC 4), isomerases (EC 5), and ligases (EC 6).

37. The host cell of claim 36, wherein the enzyme(s) are enzyme(s) with an activity selected from the group of enzyme activities consisting of aminopeptidase, amylase, amyloglucosidase, mannanase, carbohydrase, carboxypeptidase, catalase, cellulase, chitinase, cutinase, cyclodextrin glycosyltransferase, deoxyribonuclease, esterase, galactosidase, beta-galactosidase, glucoamylase, glucose oxidase, glucosidase, haloperoxidase, hemicellulase, invertase, isomerase, laccase, ligase, lipase, lyase, mannosidase, oxidase, pectinase, peroxidase, phytase, phenoloxidase, polyphenoloxidase, protease, ribonuclease, transferase, transglutaminase, and xylanase.

38. The host cell of claim 37, wherein the enzyme(s) are amylases or mannanases.

39. A process for producing at least one product of interest, comprising cultivating the B. licheniformis mutant host cell of claim 22 in a suitable medium to produce the product of interest.

40. The process of claim 39, further comprising isolating or purifying the product of interest.
